(19) United States
(12) Patent Application Publication
(10) Pub. No.: US 2022/0106400 A1
(43) Pub. Date: Apr. 7, 2022

(54) ANTIBODIES COMPRISING MODIFIED HEAVY CONSTANT REGIONS

(71) Applicant: BRISTOL-MYERS SQUIBB COMPANY, Princeton, NJ (US)

(72) Inventor: Aaron P. YAMNIUK, Lawrenceville, NJ (US)

(21) Appl. No.: 17/293,623

(22) PCT Filed: Nov. 26, 2019
(86) PCT No.: PCT/US2019/063263

§ 371 Date: May 13, 2021

Related U.S. Application Data
(60) Provisional application No. 62/772,411, filed on Nov. 28, 2018.

(51) Int. Cl. C07K 16/28

(52) U.S. Cl. CPC C07K 16/2896; C07K 16/2878; C07K 2319/30; C07K 2317/51; C07K 2317/71; C07K 2317/75; C07K 2317/77; C07K 2317/522; C07K 2317/524; C07K 2317/526; C07K 2317/92; C07K 2317/53

(57) ABSTRACT

Provided herein are heavy chain constant regions (referred to as “modified heavy chain constant regions”), or functionally equivalent fragments thereof, that (i) enhance biological properties of antibodies relative to the same antibodies in unmodified form or (ii) reduce effector function. An exemplary modified heavy chain constant region includes an IgG2 hinge and three constant domains (i.e., CH1, CH2, and CH3 domains), wherein one or more of the constant region domains are of a non-IgG2 isotype (e.g., IgG1, IgG3 or IgG4). The heavy chain constant region may comprise wildtype human IgG domain sequences, or variants of these sequences. Also provided herein are methods for enhancing certain biological properties of antibodies that comprise a non-IgG2 hinge, such as internalization, agonism and antagonism, wherein the method comprises replacing the non-IgG2 hinge of the antibody with an IgG2 hinge.

### CROSS-REFERENCE TO RELATED APPLICATIONS

[0001] This application is a 35 U.S.C. 371 national stage filing of International Application No. PCT/US2019/063263, filed Nov. 28, 2019, which claims priority to U.S. Provisional Application No. 62/772,411, filed Nov. 28, 2018. The contents of the aforementioned applications are hereby incorporated by reference in their entirety.

### SEQUENCE LISTING

[0002] The instant application contains a Sequence Listing which has been submitted in ASCII format via EFS-Web, and is hereby incorporated by reference in its entirety. Said ASCII copy, created on May 12, 2021, is named MXI_574US_ST25.txt and is 650,558 bytes in size.

### BACKGROUND

[0003] Antibody therapeutics is one of the fastest growing areas in the treatment of disease, such as cancer and immune disorders. Nevertheless, efficiently targeting an antigen by a therapeutic antibody remains a major challenge in health care. Therefore, antibody engineering has become a major focus in the pharmaceutical world. From this focus, a myriad of new engineered antibodies have emerged, such as antibody fragments, antibody drug conjugates (ADCs), antibodies with modified effector regions, and bispecific antibodies.

[0004] Antibodies facilitate their therapeutic properties through many different mechanisms. Antibodies may directly inhibit or activate a target antigen, thus regulating cell signaling. Antibodies may inhibit the binding of a ligand to a receptor. Antibodies may also induce or inhibit an immune response, for example, by boosting the subject's immune system to fight infection or cancer (e.g., as costimulators in the activation of T cells).

[0005] Furthermore, antibody-mediated internalization of a cell surface receptor/antigen is recognized as a major mechanism of action for therapeutic antibodies. In this instance, an antibody removes the target from the cell surface and from performing its function by inducing internalization into the cell. Indeed, one of the forerunners of antibody therapeutics is trastuzumab for the treatment of breast cancer. Trastuzumab targets the ErbB2 receptor and induces receptor/antibody internalization, thus inhibiting EGFR signaling. However, antibodies do not always display efficient internalization qualities, thus there is an ongoing need for antibodies with improved internalization functions. Accordingly, methods for improving the internalization of known therapeutic antibodies are highly desirable.

### SUMMARY

[0006] The invention provides heavy chain constant regions (referred to as “modified heavy chain constant regions”), or functionally equivalent fragments thereof, that enhance or modify (e.g., reduce) biological properties (e.g., effector function) of antibodies or fusion proteins comprising the modified heavy chain constant region relative to the same antibodies or fusion proteins in unmodified form. For example, antibodies comprising modified constant regions exhibit increased internalization and/or agonistic or antagonistic activity. Antibodies or fusion proteins with certain modified heavy chain constant regions (e.g., comprising one or more substitions at P238, L234, L235, G237 and K322, such as P238K, L234A, L235E, G237A and K322A) have reduced or undetectable binding to low affinity FcgRs, high affinity FcgRs or C1q resulting in reduced or undetectable effector function, such as ADCC, ADCP and/or CDC. For modified heavy chain constant regions comprising one or more substitions at P238, L234, L235, G237 and K322, the hinge and CH1 domains does not have to be an IgG2 hinge and IgG2 CH1, as it may be for other modified heavy chain constant regions described herein (those which enhance internalization and agonist activity). In embodiments in which a modified heavy chain constant region comprises at least a portion of IgG2, the heavy chain constant region may also comprise a mutation, e.g., a substitution, that reduces the heterogeneity of IgG2, such as C219S, C220S and/or C131S. Additional mutations may be included or may be excluded. A modified heavy chain constant region or fragment thereof (e.g., lacking the CH1 domain) comprising one or more substitions at P238, L234, L235, G237 and K322, such as P238K, L234A, L235E, G237A and K322A, may be part of an antibody, or may be fused to a heterologous peptide or protein to form a fusion protein (e.g., an “Fc fusion protein”).

[0007] Antibodies described herein are optimized versions of the original unmodified antibodies. In certain embodiments, a heavy chain comprises a modified constant region comprising one or more mutations or modifications relative to the wildtype heavy chain constant region. In certain embodiments, a modified heavy chain constant region includes an IgG2 hinge and three constant domains (i.e., CH1, CH2, and CH3 domains), wherein one or more of the constant region domains is a non-IgG2 human isotype (e.g., IgG1, IgG3 or IgG4), or functionally equivalent fragments thereof. The modified constant region can include the corresponding wildtype amino acid sequence, or a variant thereof, e.g., one or more (e.g., between 1-10, or more) amino acid substitutions or deletions within the hinge or the CH1, CH2, CH3 domains relative to the wildtype amino acid sequence. Accordingly, the amino acid sequence of the hinge and/or each constant domain is at least about 80%, 85%, 90%, 95%, or more (i.e., 96%, 97%, 98%, 99%, or 100%) identical to the corresponding wildtype amino acid sequence.

[0008] In one embodiment, the modified heavy chain constant region includes a wildtype human IgG2 hinge, or an amino acid sequence that is at least 95% identical to the amino acid sequence of a wildtype human IgG2 hinge. The hinge can further contain additional modifications, for example, to reduce disulfide bond formation. In one embodiment, the hinge includes the amino acid substitution C219S, relative to the wildtype human IgG2 hinge. In certain embodiments, the hinge comprises the amino acid sequence set forth in any of SEQ ID NO: 8, 21-23, 126-132 and 134-147 or one of these sequences that comprises 1-3 amino acids inserted between CVE and CPP.

[0009] In certain embodiments, the modified heavy chain constant region includes a wildtype human IgG1 hinge, or an amino acid sequence that is at least 95% identical to the amino acid sequence of a wildtype human IgG1 hinge. For modified heavy chain constant regions having reduced effector function, an IgG1 hinge may comprise an amino acid substitution at one or more of L234, L235 and G237 (in the case of G237, it may also be a deletion), such as L234A, L235E and G237A, or a conservative substitution thereof, as further described herein.

[0010] In certain embodiments, the modified heavy chain constant region includes an IgG2 CH1 domain, e.g., a wildtype human IgG2 CH1 domain, or an amino acid sequence that is at least 95% identical to the amino acid sequence of a wildtype human IgG2 CH1 domain (SEQ ID NO: 7).

[0011] In certain embodiments, the modified heavy chain constant region includes an IgG1 CH1 domain, e.g., a wildtype human IgG1 CH1 domain, or an amino acid sequence that is at least 95% identical to the amino acid sequence of a wildtype human IgG1 CH1 domain.

[0012] In certain embodiments, the modified heavy chain constant region includes an IgG1 CH2 domain, e.g., a wildtype human IgG1 CH2 domain, or an amino acid sequence that is at least 95% identical to the amino acid sequence of a wildtype human IgG1 CH2 domain. The CH2 domain may contain additional modifications (e.g., to reduce or eliminate effector functions). In certain embodiments, the CH2 domain comprises the amino acid substitutions A330S and P331S, relative to wildtype full-length human IgG1 CH2. In certain embodiments, the CH2 domain comprises SEQ ID NO: 24. For modified heavy chain constant regions having reduced effector function, an IgG1 CH2 domain may comprise an amino acid substitution at one or more of P238 and K322, such as P238K and K322A, or a conservative substitution thereof, as further described herein.

[0013] In certain embodiments, the modified heavy chain constant region includes an IgG1 CH3 domain, e.g., a wildtype human IgG1 CH3 domain, or an amino acid sequence that is at least 95% identical to the amino acid sequence of a wildtype human IgG1 CH3 domain. The CH3 domain can further contain additional modifications to confer a particular allotype. In one embodiment, the CH3 domain contains the amino acid residue E at position 356 and the amino acid M at position 358 (“f” allotype), relative to wildtype full-length human IgG1 of a different allotype (e.g., “fa” allotype, having D and L, respectively at those positions). In certain embodiments, the CH3 domain comprises SEQ ID NO: 5.

[0014] In a particular embodiment, the antibody comprises a modified heavy chain constant region wherein (a) the CH1 domain is a wildtype human IgG2 CH1 domain or a wildtype IgG1 CH1 domain, with or without additional modification, (b) the hinge is a wildtype IgG2 hinge with or without a C219S substitution, (c) the CH2 domain is a wildtype human IgG1 CH2 domain or a wildtype IgG2 CH2 domain, with or without additional modifications, and (d) the CH3 domain is a wildtype human IgG1 CH3 domain or a wildtype human IgG2 CH3 domain, with or without amino acid E at position 356 and amino acid M at position 358 (e.g., of allotype for fa). In a specific embodiment, the modified heavy chain constant region comprises an amino acid sequence described herein, e.g., set forth in any one of SEQ ID NOs: 26-37 and 78-93.

[0015] For modified heavy chain constant regions having reduced effector function, the constant region may comprise (a) a hinge that is a human IgG1 hinge comprising an amino acid substitution at one or more of L234, L235 and G237 (in the case of G237, it may also be a deletion), such as L234A, L235E and G237A, or a conservative substitution thereof; (b) a CH2 domain that is a human IgG1 CH2 domain comprising an amino acid substitution at one or more of P238 and K322, such as P238K and K322A, or a conservative substitution thereof; and (c) a CH3 domain that is a wildtype human IgG1 CH3 domain with or without amino acid E at position 356 and amino acid M at position 358 (e.g., of allotype f or fa) or a wildtype human IgG2 CH3 domain. The modified heavy chain constant region may further comprise (d) a CH1 domain that is a wildtype human IgG2 CH1 domain or a wildtype IgG1 CH1 domain, with or without additional modification. In the context of modified heavy chain constant regions having reduced effector function, the heavy chain constant region does not have to include a hinge, e.g., when it is used in a fusion protein, e.g., an Fc fusion protein.

[0016] Antibodies of the invention (i.e., antibodies having a modified constant region) may be fully human antibodies or humanized antibodies, and further exhibit one or more enhanced or altered features, compared to the same antibodies without a modified heavy chain constant region. These features may include increased or altered internalization by a cell, agonistic activity, formation of large cross-linked complexes, ADCC, receptor mediated signaling, antagonist activity, immuno-modulating activity and anti-tumor activity; introduction of a new property, e.g., agonist activit, or reduced binding to Fc receptors and/or reduced effector function (e.g., reduced ADCC, ADCP and/or CDC).

[0017] Bispecific molecules and immunoconjugates containing modified constant regions of the invention are also provided, as well as compositions which contain the antibodies, bispecifics, or immunoconjugates and an acceptable pharmaceutical carrier. Such compositions also may include one or more additional therapeutic agents, e.g., an agent that stimulates the immune system, such as a checkpoint inhibitor, a co-stimulatory molecule, an anti-CD39 antibody, or an anti-A2AR antibody.

[0018] Methods for preparing an antibody comprising a modified heavy chain constant region are also provided. Certain methods provided herein include methods of increasing internalization of an antibody by a cell, and methods for increasing the agonist activity of an antibody, compared to the same antibody comprising a hinge of a non-IgG2 isotype. Such methods comprise the steps of providing an antibody having a hinge that is not an IgG2 hinge, and replacing the hinge with an IgG2 hinge (such as a hinge that is a wildtype human IgG2 hinge, a hinge having an amino acid sequence that is at least 95% identical to the amino acid sequence of a wildtype human IgG2 hinge, or a hinge that is modified to reduce disulfide bond formation, e.g., a hinge that comprises amino acid substitution C219S). In one embodiment, internalization of the antibody is enhanced or increased by at least 10%, 30%, 50%, 75%, 2 fold, 3 fold, 5 fold or more, resulting in a reduction of the T_{1/2} by at least 10%, 30%, 50%, 75%, 2 fold, 3 fold, 5 fold or more. In certain embodiments, agonist activity is increased or enhanced by at least 10%, 30%, 50%, 75%, 2 fold, 3 fold, 5 fold or more as defined by increased cytokine release or increased proliferation in effector T cells; reduced T regulatory cell activity if engagement on Tregs reduces Treg function; or increased depletion of Tregs.

[0019] For modified heavy chain constant regions having reduced FcgR binding or effector function, they preferably have one or more of the following characteristics: (i) binding to low affinity FcgR is reduced 5, 10, 20, 50, 100 or more fold, resulting, e.g., in less than 10%, 5%, 2%, 1%, 0.1% or lower binding to the low affinity FcgR, as determined, e.g., using the method described in the Examples; (ii) binding to high affinity FcgR is reduced 5, 10, 20, 50, 100, 500 or 1000 or more fold, resulting, e.g., in less than 10%, 5%, 2%, 1%, 0.1% or lower binding to the low affinity FcgR, as determined, e.g., using the method described in the Examples; (iii) ADCC, ADCP and/or CDC is reduced 5, 10, 20, 50, 100 or more fold, resulting, e.g., in less than 10%, 5%, 2%, 1%, 0.1% or lower ADCC, ADCP and/or CDC activity, as determined, e.g., using the method described in the Examples.

[0020] In certain embodiments, the method further includes the step of replacing at least one of the CH1, CH2, or CH3 domains with a CH1, CH2, or CH3 domain of a different isotype. Such replacements include, for example: (a) replacing the CH1 domain with an IgG1 CH1 domain or an IgG2 CH1 domain; (b) replacing the CH2 domain with an IgG1 CH2 domain or an IgG2 CH2 domain; and/or (b) replacing the CH3 domain with an IgG1 CH3 domain or an IgG2 CH3 domain, wherein the replacement domain has the wildtype sequence or at least 95% identity the wildtype sequence. In certain embodiments, the CH1 domain comprises the amino acid sequence as set forth in SEQ ID NO: 7. In certain embodiments, the CH2 domain is modified to reduce or eliminate effector functions, e.g., the CH2 domain comprises amino acid substitutions A330S and P331S (SEQ ID NO:24). In certain embodiments, the CH3 domain comprises the amino acid residue E at position 356 and the amino acid M at position 358 (SEQ ID NO: 5, allotype “f”) and in certain embodiments, the CH3 domain comprises allotype “fa.”

[0021] Methods provided herein include methods of treating a subject by administering an antibody, fusion protein, bispecific molecule or immunoconjugate comprising a modified heavy chain constant region. One or more additional therapeutic agents, e.g., a therapeutic agent that stimulates the immune system, such as a checkpoint inhibitor, a co-stimulatory molecule also can be co-administered.

[0022] Provided herein are antibodies comprising a modified heavy chain constant region comprising a CH1 domain, a hinge, a CH2 domain, and a CH3 domain in order from N- to C-terminus, and wherein (a) the CH1 domain comprises the amino acid sequence of SEQ ID NO: 7 or an amino acid sequence that differs therefrom in at most 5 amino acids or which is at least 95% identical to SEQ ID NO: 7, and wherein at least one of C131, R133, E137, S138 or R217 are not substituted or deleted; (b) a hinge comprising any one of SEQ ID NO: 8, 21-23, 126-132 or 134-147 or a sequence that comprises 1-3 amino acids inserted between CVE and CPP, or which differs therefrom in at most 5 amino acids, wherein the hinge does not comprise a substitution or deletion at both C219 and C220; (c) the antibody has at least one enhanced property or a new introduced property relative to the same antibody that comprises an IgG1 hinge and CH1 domain; and (d) the modified heavy chain constant region is not a wildtype IgG2 constant region or an IgG2 constant region comprising C219S and/or C220S. The hinge may comprise the amino acid sequence ERKXCVECPPCPAP (SEQ ID NO: 129) or ERKCXVECPPCPAP (SEQ ID NO: 130), wherein X is any amino acid except cysteine. For example, the hinge may comprise the amino acid sequence ERKSCVECPPCPAP (SEQ ID NO: 131) or ERKCSVECPPCPAP (SEQ ID NO: 132). In certain embodiments at least one of, or all of, amino acid residues P233, V234, A235 and G237 are deleted or substituted with another amino acid residue, e.g., the corresponding amino acid in an IgG1 hinge. In certain embodiments, none of amino acid residues R133, E137, S138 and R217 or none of C131, R133, E137, S138 and R217 are substituted or deleted. In certain embodiments, N192 and/or F193 are substituted with another amino acid. The antibody may comprise a CH2 domain that is at least 95% identical to that of wildtype IgG1. The antibody may comprise a CH3 domain that is at least 95% identical to that of wildtype IgG1. In certain embodiments, the CH2 and/or CH3 domain is not a wildtype IgG1 CH2 and/or CH3 domain, and the antibody has an effector function that is more potent than that of wildtype IgG1. In certain embodiments, the CH2 and/or CH3 domain is not a wildtype IgG1 CH2 and/or CH3 domain, and the antibody has an effector function that less potent than that of wildtype IgG1. In certain embodiments, the antibody comprises a CH2 domain and/or CH1 domain that is at least 95% identical to that of wildtype IgG1 or IgG4. In certain embodiments, the antibody has at least one enhanced property selected from agonist activity, antibody mediated receptor internalization, ADCC, receptor mediated signaling, antagonist activity, immuno-modulating activity or anti-tumor activity; or a newly introduced property, which is agonist activity.

[0023] In certain embodiments, an antibody comprises a modified heavy chain constant region, wherein (a) the CH1 domain is a wildtype human IgG2 CH1 domain; (b) the hinge comprises SEQ ID NO: any one of SEQ ID NO: 8, 21-23, 126-132 or 134-147 or a sequence that comprises 1-3 amino acids inserted between CVE and CPP; (c) the CH2 domain is a wildtype human IgG1 CH2 domain or a modified CH2 domain conferring enhanced or reduced effector function to the antibody; and (d) the CH3 domain is a wildtype human IgG1 CH3 domain or a modified CH3 domain conferring enhanced or reduced effector function to the antibody. A modified heavy chain constant domain may comprise the amino acid sequence set forth in any one of SEQ ID NOs: 26-37, 54-56, 78-125, 152-232, 234-245 and 247-262, or an amino acid sequence that is at least 95% identical to one or more of SEQ ID NOs: 26-37, 54-56, 78-125, 152-232, 234-245 and 247-262. For heavy chains that comprise an Fc having an amino acid sequence that is at least 95% identical to any of these sequences, it is preferable that the specific amino acid mutations made to modulate biological activity in these sequences are not varied.

[0024] In certain embodiments, an antibody comprises a modified heavy chain constant region, wherein the heavy chain constant region comprises a CH1 domain and a hinge comprising the sequence

(SEQ ID NO: 133)
ASTKGPSVFPLAPCSRSTSESTAALGCLVKDYFPEPVTVSWNSGALTSGV
HTFPAVLQSSGLYSLSSVVTVPSSNFGTQTYTCNVDHKPSNTKVDKTVER
KCCVECPPCPAPPVAG,

or an amino acid sequence that differs from SEQ ID NO: 133 in at most 10 amino acids or is at least 90% identical to SEQ ID NO: 133, wherein (i) at least one of C131, R133, E137, S138 and R217 is not substituted with another amino acid or deleted; (ii) C219 and C220 may be substituted with another amino acid or deleted, but C219 and C220 may not both be substituted or deleted; (iii) 1-3 amino acids may be inserted between CVE and CPP in the hinge; (iv) the hinge optionally comprises an additional amino acid at the C-terminus, e.g., G; (v) one or more of amino acids P233, V234, A235 and G237 may be substituted with another amino acid (e.g., the corresponding amino acid from IgG1) or deleted; (vi) the CH2 and CH3 domains may be wildtype or modified IgG1, IgG2, IgG3 or IgG4 CH2 and CH3 domains; (vii) the modified heavy chain constant region is not a wildtype IgG2 heavy chain constant region or a wildtype IgG2 heavy constant domain with C219S or C220S; and (viii) the antibody has at least one enhanced property or a new introduced property relative to the same antibody that comprises an IgG1 hinge and CH1 domain. In certain embodiments, the antibody has at least one enhanced property selected from agonist activity, antibody mediated receptor internalization, ADCC, receptor mediated signaling, antagonist activity, immuno-modulating activity or anti-tumor activity; or a newly introduced property, which is agonist activity. In certain embodiments, none of amino acids C131; R133; E137; S138; R217 are substituted with another amino acid or deleted. In certain embodiments, N192 and/or F193 are not substituted or are N192S and/or F193L, respectively. In certain embodiments, C219 is C219S, C220 is C220S, P233-G237 are substituted or deleted; V234-G237 are substituted or deleted; A235-G237 are substituted or deleted; G237 is substituted or deleted; P233 is substituted or deleted; P233-V234 are substituted or deleted; or P233-A235 are substituted or deleted. The antibody may have effector function, or be deprived of effector function. The antibody may comprise a wildtype or modified IgG1 CH2 domain and or a wildtype or modified IgG1 CH3 domain.

[0025] In certain embodiments, an antibody comprises a modified heavy chain constant region, wherein the heavy chain constant region comprises a CH1 domain comprising the sequence ASTKGPSVFPLAPCSRSTSESTAALGCLVKDYFPEPVTVSWNSGALTSGVHTFPAVL QSSGLYSLSSVVTVPSSNFGTQTYTCNVDHKPSNTKVDKTVE (SEQ ID NO: 7), or an amino acid sequence that differs from SEQ ID NO: 7 in at most 10 amino acids or is at least 90% identical to SEQ ID NO: 7, wherein (i) at least one of C131, R133, E137, S138 and R217 is not substituted or deleted; (ii) the modified heavy chain constant region is not a wildtype IgG2 heavy chain constant region or a wildtype IgG2 heavy constant domain with C219S or C220S; and (iii) the antibody has at least one enhanced property or a new introduced property relative to the same antibody that comprises an IgG1 hinge and CH1 domain. The antibody may have at least one enhanced property selected from agonist activity, antibody mediated receptor internalization, ADCC, receptor mediated signaling, antagonist activity, immuno-modulating activity or anti-tumor activity; or a newly introduced property, which is agonist activity. In certain embodiments, none of amino acids C131; R133; E137 and S138 are substituted with another amino acid or deleted. In certain embodiments, N192 and/or F193 are not substituted or are N192S and/or F193L, respectively. The antibody may have effector function, or be deprived of effector function. The antibody may comprise a wildtype or modified IgG1 CH2 domain and or a wildtype or modified IgG1 CH3 domain.

[0026] An antibody may comprise a modified heavy chain constant region, wherein the heavy chain constant region comprises a hinge comprising the sequence ERKCCVECPPCPAPPVAG (SEQ ID NO: 8), or an amino acid sequence that differs from SEQ ID NO: 8 in at most 5 amino acids, wherein (i) C219 and C220 may be substituted with another amino acid or deleted, but C219 and C220 may not both be substituted or deleted; (ii) one or more of amino acids P233, V234, A235 and G237 may be substituted or deleted; (iii) 1-3 amino acids may be inserted between CVE and CPP in the hinge; (iv) the hinge optionally comprises an additional amino acid at the C-terminus, e.g., G; (v) the CH2 and CH3 domains may be wildtype or modified IgG1, IgG2, IgG3 or IgG4 CH2 and CH3 domains; (vi) the modified heavy chain constant region is not a wildtype IgG2 heavy chain constant region or a wildtype IgG2 heavy constant domain with C219S or C220S; and (vii) the antibody has at least one enhanced property or a new introduced property relative to the same antibody that comprises an IgG1 hinge and CH1 domain. The antibody may have at least one enhanced property selected from agonist activity, antibody mediated receptor internalization, ADCC, receptor mediated signaling, antagonist activity, immuno-modulating activity or anti-tumor activity; or a newly introduced property, which is agonist activity. In certain embodiments, C219 is C219S, C220 is C220S, P233-G237 are substituted or deleted; V234-G237 are substituted or deleted; A235-G237 are substituted or deleted; G237 is substituted or deleted; P233 is substituted or deleted; P233-V234 are substituted or deleted; or P233-A235 are substituted or deleted. The antibody may have effector function, or be deprived of effector function. The antibody may comprise a wildtype or modified IgG1 CH2 domain and or a wildtype or modified IgG1 CH3 domain.

[0027] Also provided are antibodies comprising a modified heavy chain constant region, wherein the heavy chain constant region comprises an IgG1 or IgG2 hinge, and wherein the hinge is lacking 1-7 amino acids, and wherein the antibody has at least one enhanced property or a new introduced property relative to the same antibody that comprises an IgG1 hinge and CH1 domain. The antibody may have at least one enhanced property selected from agonist activity, antibody mediated receptor internalization, ADCC, receptor mediated signaling, antagonist activity, immuno-modulating activity or anti-tumor activity; or a newly introduced property, which is agonist activity. The hinge may be an IgG2 hinge that is lacking 1-4 amino acids, e.g., amino acids C219, C220, V222 and E224. The hinge is an IgG1 hinge that is lacking amino acids S219, C220, D221, K222, T223, H224 and T225. The antibody may comprise an IgG2 CH1 domain that is wildtype or modified; an IgG1 CH1 domain that is wildtype or modified, and an IgG1, IgG2 or IgG4 CH2 domain and an IgG1, IgG2 or IgG4 CH3 domain.

[0028] Antibodies with modified heavy chain constant regions may be human or humanized antibodies, or antigen binding portions thereof. In certain embodiments, the antibody binds specifically to an antigen that is involved in immune regulation. The antibody may be an agonist of a costimulatory receptor or an antagonist of an inhibitory receptor. For example, the antibody may bind to a costimulatory receptor, e.g., selected from the group of B7-1, B7-2, CD28, 4-1BB, GITR, OX40, ICOS, CD70, CD27, CD40, DR3 or CD28H, or the antibody may bind to an inhibitory receptor, e.g., selected from the group of CTLA-4, PD-1, PD-L1, PD-L2, LAG-3, TIM-3, Galectin 9, CEACAM-1, BTLA, CD69, Galectin-1, TIGIT, CD113, GPR56, VISTA, 2B4, CD48, GARP, PD1H, LAIR1, TIM-1 and TIM-4. The antigen may be an antigen that is required to be internalized, e.g., CD73. The antigen may be CD39.

[0029] In certain embodiments, an antibody comprising a modified heavy chain constant region binds specifically to a costimulatory receptor, e.g, GITR, OX40, 4-1BB, CD28, ICOS, CD40, CD27 or any other TNFR superfamily member, and comprises a modified heavy chain constant region selected from the group of SEQ ID NOs: 26-37, 54-56, 78-125, 152-232, 234-245 and 247-262. In certain embodiments, the antibody exhibits enhanced or altered agonist activity relative to an antibody having the same variable regions and light chain, but comprising an IgG1 heavy chain constant region.

[0030] In certain embodiments, an antibody comprising a modified heavy chain constant region binds specifically to a cell surface molecule, e.g., CD73, and triggers antibody mediated internalization of the cell surface molecule, and comprises a modified heavy chain constant region selected from the group of SEQ ID NOs: 26-37, 54-56, 78-125 and 152-232. In certain embodiments, the antibody possesses enhanced or altered internalization properties relative to an antibody having the same variable regions and light chain, but comprising an IgG1 heavy chain constant region. Anti-CD73 antibodies may also be linked to an Fc having any an amino acid sequence selected from the group consisting of SEQ ID NOs: 234-245 and 247-262.

[0031] In certain embodiments, an antibody comprising a modified heavy chain constant region binds specifically to an inhibitory receptor, e.g., CTLA-4, PD-1, LAG-3, TIM-3, Galectin 9, CEACAM-1, BTLA, CD69, Galectin-1, TIGIT, CD113, GPR56, VISTA, 2B4, CD48, GARP, PD1H, LAIR1, TIM-1 and TIM-4, and comprises a modified heavy chain constant region selected from the group of SEQ ID NOs: 26-37, 54-56, 78-125, 152-232, 234-245 and 247-262. In certain embodiments, the antibody exhibits more potent or altered antagonist activity or introduces a new activity relative to the same antibody having an IgG1 heavy chain constant region. In certain embodiments, the Fc comprises one or more mutations to modulate, e.g., reduce, effector function.

[0032] In certain embodiments, an antibody comprising a modified heavy chain constant region binds specifically to a cell surface molecule and triggers intracellular signaling, wherein the antibody comprises a modified heavy chain constant region selected from the group of SEQ ID NOs: 26-37, 54-56, 78-125, 152-232. In certain embodiments, intracellular signaling mediates agonist activity, antagonist activity, internalization of the cell surface molecule, or ADCC. In certain embodiments, the antibody triggers more potent intracellular signaling relative to to an antibody having the same variable regions and light chain, but comprising an IgG1 heavy chain constant region.

[0033] In certain embodiments, an antibody comprising a modified heavy chain constant region binds specifically to a cell surface molecule and triggers formation of high molecular weight antibody-cell surface molecule complexes, wherein the antibody comprises a modified heavy chain constant region selected from the group of SEQ ID NOs: 26-37, 54-56, 78-125, 152-232. In certain embodiments, the antibody triggers formation of higher molecular weight complexes relative to an antibody having the same variable regions and light chain, but comprising an IgG1 heavy chain constant region.

[0034] In certain embodiments, an antibody comprising a modified heavy chain constant region binds specifically to a cell surface molecule and triggers clustering or oligomerization of the cell surface molecule, wherein the antibody comprises a modified heavy chain constant region selected from the group of SEQ ID NOs: 26-37, 54-56, 78-125, 152-232. In certain embodiments, the antibody triggers more clustering or oligomerization of the cell surface molecule relative to an antibody having the same variable regions and light chain, but comprising an IgG1 heavy chain constant region.

[0035] In embodiments of modified heavy chain constant regions having reduced effector function (and/or FcgR binding), an antibody or fusion protein comprising it may bind to any protein of interest, such as a cell surface protein, which may stimulate the immune system, or alternatively inhibit the immune system, or have an entirely different activity. In embodiments of modified heavy chain constant regions having reduced effector function (and/or FcgR binding), an antibody or fusion protein comprising it may be used for any purpose in which binding to one or more FcgRs and/or an effector function, such as ADCC, ADCP or CDC, is not desired, e.g., where all the biological activity of the molecule is mediated through the antigen binding site for an antibody or through the heterologous protein for a fusion protein.

[0036] Also provided herein are bispecific molecules comprising an antibody or antigen binding fragment thereof comprising a modified heavy chain constant region linked to a molecule having a second binding specificity. Also provided herein are immunoconjugates comprising an antibody comprising a modified heavy chain constant region, linked to a second agent. Composition comprising an antibody, bispecific or immunoconjugate described herein and a carrier are also provided. Compositions may comprise one or more additional therapeutic agents, e.g., a therapeutic agent stimulates the immune system, and is, e.g., an antagonist of a checkpoint inhibitor or a co-stimulatory receptor.

[0037] Also provided herein are methods of preparing an antibody comprising a modified heavy chain constant region, wherein the antibody comprises a CH1 domain, a hinge, a CH2 domain, and a CH3 domain in order from N- to C-terminus, comprising the steps of: (a) providing an antibody comprising a hinge and/or a CH1 domain that is not an IgG2 hinge and/or IgG2 CH1 domain; and (b) replacing the hinge and/or the CH1 domain with an IgG2 hinge and/or IgG2 CH1 domain, respectively. Further provided herein are methods of increasing internalization of an antibody by a cell, comprising: (a) providing an antibody comprising a hinge and/or a CH1 domain that is not an IgG2 hinge and/or IgG2 CH1 domain; and (b) replacing the hinge and/or the CH1 domain with an IgG2 hinge and/or IgG2 CH1 domain, respectively. Internalization of the antibody may be increased compared to internalization of the same antibody comprising a hinge of a non-IgG2 isotype, e.g., an antibody comprising an IgG1 constant region. Also provided are methods of increasing the agonist activity of an antibody, comprising: (a) providing an antibody comprising a hinge and/or a CH1 domain that is not an IgG2 hinge and/or IgG2 CH1 domain; and (b) replacing the hinge and/or the CH1 domain with an IgG2 hinge and/or IgG2 CH1 domain, respectively. The agonist activity may be increased compared to agonist activity of the same antibody comprising a hinge of a non-IgG2 isotype, e.g., an antibody comprising an IgG1 constant region. An IgG2 hinge may be a wildtype human IgG2 hinge, or comprises an amino acid sequence that is at least 95% identical to the amino acid sequence of a wildtype human IgG2 hinge and may comprise, e.g., a sequence set forth in Table 4. A method may comprise the step of replacing at least one of the CH1, CH2, or CH3 domains with a CH1, CH2, or CH3 domain of a different isotype, respectively. A method may comprise the steps of (a) replacing the CH1 domain with an IgG2 CH1 domain; (b) replacing the CH2 domain with an IgG1 CH2 domain; and/or (b) replacing the CH3 domain with an IgG1 CH3 domain. A method may comprise the steps of (a) replacing the CH1 domain with a wildtype human IgG2 CH1 domain, or a domain at least 95% identical thereto; (b) replacing the CH2 domain with a wildtype human IgG1 CH2 domain, or a domain at least 95% identical thereto; and/or (b) replacing the CH3 domain with a wildtype human IgG1 CH3 domain, or a domain at least 95% identical thereto. A method may comprise the step of replacing the heavy chain constant region with a modified heavy chain constant region comprising any one of SEQ ID NOs: 26-37, 54-56, 78-125, 152-232, 234-245 and 247-262 or a region at least 95% identical to SEQ ID NOs: 26-37, 54-56, 78-125, 152-232, 234-245 and 247-262 (or introducing into the Fc the amino acid mutations of these sequences). The hinge may be modified to reduce or alter disulfide bond formation. The hinge may comprise amino acid substitution C219S. The hinge may comprise an amino acid sequence set forth in any one of SEQ ID NO: 8, 21-23, 126-132 or 134-147 or a sequence that comprises 1-3 amino acids inserted between CVE and CPP. The CH1 domain may comprise the amino acid sequence ASTKGPSVFPLAPCSRSTSESTAALGCLVKDYFPEPVTVSWNSGALTSGVHTFPAVLQ SSGLYSLSSVVTVPSSNFGTQTYTCNVDHKPSNTKVDKTV (SEQ ID NO: 7). The CH2 domain may be modified to reduce or eliminate effector functions. The CH2 domain may comprise amino acid substitutions A330S and P331S. The CH2 domain may comprise the amino acid sequence PSVFLFPPKPKDTLMISRTPEVTCVVVDVSHEDPEVKFNWYVDGVEVHNAKTKPREE QYNSTYRVVSVLTVLHQDWLNGKEYKCKVSNKALPAPIEKTISKAK (SEQ ID NO: 4). The CH2 domain may comprise amino acid substitutions A330S and P331S. The CH3 domain may comprise the amino acid sequence GQPREPQVYTLPPSREEMTKNQVSLTCLVKGFYPSDIAVEWESNGQPENNYKTTPPV LDSDGSFFLYSKLTVDKSRWQQGNVFSCSVMHEALHNHYTQKSLSLSPGK (SEQ ID NO: 5).

[0038] Also provided herein are modified heavy chain constant regions from, e.g., IgG1 or IgG2 or IgG1/IgG2 chimeric forms thereof, with reduced or undetectable binding to one or more FcγRs (e.g., CD16, CD32, CD64), thereby resulting in reduced ADCC, ADCP and/or CDC. Such modified heavy chain constant regions may have 1-5, 1-3, 1-2 or a single mutation (e.g., substitution) relative to the wildtype heavy chain constant region. Such modified heavy chain constant regions may comprise the following mutation or combination thereof: P238K, P238K/L235E, P238K/L235E/K322A, optionally combined with L234A and/or G237A, and optionally without any additional mutation, e.g., any additional mutation that reduces effector function. Instead of comprising one or more of P238K, L235E, K322A, L234A and G237A, heavy chain constant regions may comprise amino acids residues with similar characteristics as those of the amino acid residues K (for P238K), E (for L235E) and A (for K322A, L234A and G237A), respectively (“conserved amino acid substitutions,” further described herein). Such modified heavy chain regions with reduced or undetectable effector function and/or FcgR binding may be comprised in an antibody or derivative or fragment thereof or in a fusion protein in which the modified heavy chain constant region is fused to a heterologous protein or polypeptide. Certain modified heavy chain constant region having reduced FcgR binding and/or effector function do not comprise a CH1 domain and/or a hinge. For example, a modified heavy chain constant region having reduced FcgR binding and/or effector function may comprise a CH2 domain comprising an amino acid substitution at P238, e.g., P238K and optionally an amino acid substitution at K322, e.g., K322A, but does not have to comprise a CH1 domain and/or a hinge domain. For fusion proteins, it may not be necessary that the constant domain linked to the heterologous domain contain a CH1 or hinge region.

[0039] Also provided are antibodies, or antigen binding portion thereof, or fusion proteins produced by the methods described herein, e.g., set forth above, e.g., human or humanized antibodies. Methods of treating a subject, e.g., a subject having cancer or an immune disease, with any of the antibodies described herein are also encompassed herein. The methods may comprise administering one or more additional therapeutic agents, e.g., therapeutic agents that stimulate or inhibit the immune system. For example, a therapeutic agent may target a checkpoint inhibitor or a co-stimulatory molecule. Methods may include administering a composition, bispecific molecule, or immunoconjugate described herein.

### BRIEF DESCRIPTION OF THE DRAWINGS

[0040] FIG. 1A shows the kinetics of antibody mediated internalization of CD73 in H2228 cells (non-small cell lung carcinoma cell line) by the following antibodies: 11F11, 4C3, 6D11, CD73.3-IgG1.1f with the 4C3Vk1 light chain (“3-Vh-hHC-IgG1.1f/4C3Vk1”), CD73.4-IgG2CS with the 11F11 Vk2 light chain (“4-Vh-hHC-IgG2-C219S/11F11-Vk2”), CD73.10-IgG2CS (“CD73.10-Vh-hHC-IgG2-C219S”), CD73.10-IgG2CS-IgG1.1f (“CD73.10-Vh-hHC-IgG2-C219S-IgG1.1f”), and CD73.10-IgG1.1f (“CD73.10-Vh-hHC-IgG1.1f”) antibodies in H2228 cells. The 11F11 (which is of an IgG2 isotype), CD73.4-IgG2CS, CD73.10-IgG2CS and CD73.10-IgG2CS-IgG1.1f antibodies are internalized faster and to a higher degree than the other tested antibodies, which are of an IgG1 isotype.

[0041] FIG. 1B shows the kinetics of antibody mediated CD73 internalization of the same antibodies as those shown in FIG. 1A in HCC15 cells (non-small cell lung carcinoma cell line), showing similar results to those obtained in H2228 cells.

[0042] FIG. 1C shows the kinetics of antibody mediated CD73 internalization of the same antibodies as those shown in FIGS. 1A and 1B, as well as CD73.11-IgG2CS (“11-Vh-hVC-IgG2-C219S”), in Calu6 cells, showing similar results to those obtained in H2228 and HCC15 cells.

[0043] FIG. 1D shows the kinetics of antibody mediated CD73 internalization of the same antibodies as those shown in FIG. 1C in NCI-2030 cells (non-small cell lung carcinoma cell line), showing similar results to those obtained in H2228, HCC15, and Calu6 cells.

[0044] FIG. 1E shows the kinetics of antibody mediated CD73 internalization of the indicated antibodies in Calu6 cells, as measured by flow cytometry.

[0045] FIG. 1F shows the kinetics of antibody mediated CD73 internalization of the indicated antibodies in NCI-H292 cells (mucoepidermoid pulmonary carcinoma cell line), as measured by flow cytometry, but where the antibodies were not washed out after the first incubation of the cells with the antibodies.

[0046] FIG. 1G shows the percentage of CD73 internalized in Calu6 cells treated with the indicated antibodies, showing antibody mediated CD73 internalization of the indicated antibodies in Calu6 cells over time.

[0047] FIG. 1H shows the percentage of CD73 internalized in NCI-H292 cells treated with the indicated antibodies over time, showing antibody mediated CD73 internalization of the indicated antibodies in NCI-H292 cells over time.

[0048] FIG. 1I shows the percentage of CD73 internalized in SNU-C1 cells (colon carcinoma cell line) treated with the indicated antibodies over time, showing antibody mediated CD73 internalization of the indicated antibodies in SNU-C1 cells over time.

[0049] FIG. 1J shows the percentage of CD73 internalized in NCI-H1437 cells (non-small cell lung carcinoma cell line) treated with the indicated antibodies over time, showing antibody mediated CD73 internalization of the indicated antibodies in NCI-H1437 cells over time.

[0050] FIG. 2 shows the binding kinetics of the indicated anti-human GITR antibodies to anti-CD3 (plate coated) and CD28-activated human CD4 T cells and their corresponding EC50 values derived from the graph.

[0051] FIGS. 3A, 3B and 3C show the secretion of IFN-γ and IL-2 from donor CD4 T cells stimulated with soluble anti-human GITR antibodies with different heavy chain constant regions. FIG. 3A shows IFN-γ secretion from donor CD4 T cells stimulated with OKT3 expressing CHO cells and various concentrations of anti-human GITR antibodies with an IgG2-IgG1 constant region. FIG. 3B shows IL-2 secretion from donor CD4 T cells stimulated with OKT3 expressing CHO cells and various concentrations of an IgG1 heavy chain constant domain or an IgG2-IgG1 hybrid heavy chain constant domain. FIG. 3C shows IL-2 secretion from donor CD4 T cells stimulated with OKT3 expressing CHO cells and various concentrations of effectorless versions (IgG1.1) of the antibodies in FIGS. 3A and B.

[0052] FIG. 4 shows IL-2 secretion from 3A9-hGITR cells cultured on anti-CD3 monoclonal antibody-coated plates in the presence of increasing amounts of the indicated anti-human GITR antibodies: the hybridoma anti-GITR (IgG2) and recombinant derivatives as IgG1f, IgG1.1 (effectorless), or as chimera with the IgG2 hinge.

[0053] FIGS. 5A, 5B, 5C and 5D show the effect of an IgG2 hinge on the size of antibody/antigen complexes. FIGS. 5A, 5B and 5C show SEC chromatogram data, DLS data and MALS data, for complexes of hCD73-his with the antibody CD73.4 containing different constant regions. FIG. 5D shows a schematic model of the hCD73-his/mAb complexes derived from the MALS-determined masses in FIG. 5C.

[0054] FIG. 6A-6D shows SEC-MALS data for CD73/mAb complexes.

[0055] FIG. 7A-7B shows DLS data for CD73/mAb complexes.

[0056] FIG. 8A shows the percentage of CD73 internalized in Calu6 cells treated with the indicated antibodies over time, showing antibody mediated CD73 internalization of the indicated antibodies in Calu6 cells over time.

[0057] FIG. 8B shows the percentage of CD73 internalized in NCI-H292 cells treated with the indicated antibodies over time, showing antibody mediated CD73 internalization of the indicated antibodies in Calu6 cells over time.

[0058] FIG. 8C shows the level of CD73 on the surface of Calu6 cells treated with 5 μg/ml of the indicated antibodies for 0, 5, 15 or 30 minutes.

[0059] FIG. 9 shows the level of IL-2 secreted by CD4+ T cells co-cocultured with CHO-OKT3 cells in the presence of an anti-GITR antibody having the indicated constant regions.

[0060] FIG. 10 shows the percentage of antibody mediated CD73 internalization at 1, 4 or 21 hours after the addition of each of the shown antibodies. The bars for each antibody are shown in the order of 21 hours (on the left), 4 hours (middle) and 1 hour (right).

[0061] FIG. 11A shows overlay of SEC chromatogram data for 1:1 molar complexes of hCD73-his with 16 different CD73.4 antibodies containing different constant region sequences.

[0062] FIG. 11B shows an expansion of the chromatogram data from 11-19.5 min of the chromatogram of FIG. 10A, with 4 distinct elution species indicated.

[0063] FIG. 11C shows the percentage of the UV chromatogram signal area for peak 2 of FIG. 11B, plotted for the 16 different antibody/CD73-his complexes. Data is sorted from left to right in order of increasing peak area.

[0064] FIG. 12 shows antibody binding to anti-his Fab captured FcγR-his proteins. Binding responses are plotted as a percentage of the theoretical Rmax assuming a 1:1 mAb:FcγR binding stoichiometry. The bars for each antibody are shown in the order provided by the color legends at the bottom of the slide.

[0065] FIG. 13 shows antibody binding to anti-his Fab captured FcgR-his proteins. Binding responses are plotted as a percentage of the theoretical Rmax assuming a 1:1 mAb:FcγR binding stoichiometry. The bars for each antibody are shown in the order provided by the color legends at the bottom of the slide.

[0066] FIG. 14A shows antibody binding to anti-his Fab captured FcγR-his proteins. Binding responses are plotted as a percentage of the theoretical Rmax assuming a 1:1 mAb:FcγR binding stoichiometry. The bars for each antibody are shown in the order provided by the color legends at the bottom of the slide.

[0067] FIG. 14B shows antibody binding to anti-his Fab captured FcγR-his proteins. Binding responses are plotted as a percentage of the theoretical Rmax assuming a 1:1 mAb:FcγR binding stoichiometry. The bars for each antibody are shown in the order provided by the color legends at the bottom of the slide.

[0068] FIG. 15 shows an internalization time course analysis of anti-GITR antibodies.

[0069] FIG. 16A shows GITR and early endosome marker EEA2 co-localization analysis at time zero.

[0070] FIG. 16B shows GITR and early endosome marker EEA2 co-localization analysis at time 30 and 120 minutes.

[0071] FIG. 16C shows the results of quantification of endosomal co-localization shown in FIGS. 16A and 16B plotted as the ratio of colocalized pixel intensity relative to total staining.

[0072] FIG. 17A shows NFkB signaling activation in CD8+ T cells treated with the indicated anti-GITR antibodies.

[0073] FIG. 17B shows NFkB signaling activation in CD4+ T cells treated with the indicated anti-GITR antibodies.

[0074] FIG. 18 shows P38 activation in CD4+ T cells treated with the indicated anti-GITR antibodies.

[0075] FIG. 19 shows the configuration of the disulfide bonds in IgG2 antibodies having conformation A, B or A/B.

[0076] FIG. 20A shows the level of IL-2 secreted by CD4+ T cells co-cocultured with CHO-OKT3 cells in the presence of different concentrations of an anti-GITR antibody having the indicated constant regions.

[0077] FIG. 20B shows the level of IL-2 secreted by CD4+ T cells co-cocultured with CHO-OKT3 cells in the presence of 5 μg/ml of an anti-GITR antibody having the indicated constant regions (same experiment as that in FIG. 20A).

[0078] FIG. 20C shows the level of IL-2 secreted by CD4+ T cells co-cocultured with CHO-OKT3 cells in the presence of 1.25 μg/ml of an anti-GITR antibody having the indicated constant regions (same experiment as that in FIG. 20A).

[0079] FIG. 20D shows the level of IL-2 secreted by CD4+ T cells co-cocultured with CHO-OKT3 cells in the presence of 0.313 μg/ml of an anti-GITR antibody having the indicated constant regions (same experiment as that in FIG. 20A).

[0080] FIG. 21 shows the amino acid sequence of a portion of hIgG1f, wherein the underlined sequences are reproduced below and show the location of the mutations in the hIgG1, hIgG1.1f, hIgG1.3f and hIgG1-P238K amino acid sequences relative to wild-type IgG1.

[0081] FIGS. 22A, 22B, 22C, 22D, 22E, 22F, 22G, 22H, 22I, 22J, 22K, and 22L show a comparison of the dissociation rates of the antibody Y1238 in the context of different Fc regions from the indicated Fc receptors based on sensorgram data.

[0082] FIGS. 23A, 23B, 23C, 23D, 23E, and 23F show the charge profiles for dAb-Fc molecules as characterized by icIEF.

### DETAILED DESCRIPTION

[0083] In certain embodiments, one of the invention is based, at least in part, on the findings that the following properties of antibodies are enhanced or altered when the antibodies comprise an IgG2 hinge relative to the same antibodies that comprise a non-IgG2 hinge (or relative to the same antibodies comprising an IgG1 constant region): (i) internalization; (ii) agonist function; (iii) receptor mediated intracellular signaling; (iv) ADCC; and (v) weight of antibody/antigen complexes. In addition, these enhanced or altered features of antibodies are further enhanced or altered when the antibodies comprise, in addition to an IgG2 hinge, an IgG2 CH1 domain. It has also been observed that antibodies having an IgG2 CH1 domain, but not an IgG2 hinge, have enhanced or altered activities compared to the same antibodies having an IgG1 CH1 domain. Without wanting to be limited to a particular mechanism of action, the enhancing effects of an IgG2 hinge has been found to correlate with an increase in size of antibody/antigen complexes. The enhanced size of antibody/antigen complexes when the antibody has an IgG2 hinge may result from a higher rigidity of IgG2 hinges relative to that of other isotypes. Furthermore, it has been shown that specific regions or amino acid residues of the IgG2 hinge and CH1 domain may be modified, whereas others are preferably not modified, to preserve the enhanced or altered activities.

[0084] As further described herein, these modified heavy chain constant regions conferring onto antibodies (or antigen binding regions thereof) enhanced or modified activities may have effector function. Thus, it was shown that antibodies may be created that have the advantageous properties conferred by an IgG2 hinge and/or CH1 domain and also have effector function.

[0085] The invention is also based at least in part on the finding that deletion of certain portions of a hinge in an IgG1 or IgG2 antibody results in the antibody having enhanced or altered properties relative to the antibody with an IgG1 constant region.

[0086] In addition to the modified heavy chain regions conferring enhanced properties, as described in the previous two paragraphs, also described herein are modified heavy chain regions that have mutations that reduce low affinity and/or high affinity FcGR binding and/or ADCC, ADCP and/or CDC effector function, which constant regions comprise, e.g., a P238 mutation, e.g., P238K. In some some embodiments, such one or more mutation is combined with one or more mutation that reduces FcRg binding, ADCC, ADCP and/or CDC and/or a mutation that enhances (i) internalization; (ii) agonist function; (iii) receptor mediated intracellular signaling; and/or (v) weight of antibody/antigen complexes.

[0087] Accordingly, provided herein are (i) antibodies having modified heavy chain constant regions conferring to the antigen binding regions of the antibodies enhanced or altered properties and methods of using them, and (ii) methods for enhancing or altering certain biological properties of antibodies that comprise, e.g., a non-IgG2 hinge and/or CH1 domain, such as internalization, agonism and antagonism, wherein the method comprises replacing the non-IgG2 hinge and/or CH1 domain of the antibody with an IgG2 hinge and/or IgG2 CH1 domain or portion thereof.

[0088] Provided herein are “modified heavy chain constant regions” that enhance certain biological properties of antibodies, e.g., antibodies that have a non-IgG2 hinge and/or a non-IgG2 CH1 domain, relative to the same antibodies having different constant regions. Exemplary modified heavy chain constant regions include an IgG2 hinge, a CH1 domain, a CH2 domain and a CH3 domain, wherein at least one of these constant domains is not of the IgG2 isotype and may be, e.g., of an IgG1, IgG3 or IgG4. In certain embodiments, a modified heavy chain constant region comprises an IgG2 hinge and IgG1 CH2 and CH3 domains. In certain embodiments, a modified heavy chain constant region comprises an IgG2 CH1 domain and an IgG2 hinge. In certain embodiments, a modified heavy chain constant region comprises an IgG2 CH1 domain, an IgG2 hinge, an IgG1 CH2 domain and an IgG1 CH3 domain. A modified heavy chain constant region may have effector function similar to that of wild-type IgG1, or may be engineered to have reduced or enhanced effector function relative to that of the wildtype IgG. A modified heavy chain constant region may comprise a wildtype CH1, hinge, CH2 and/or CH3 domain, or a variant thereof, e.g., a CH1, hinge, CH2 and/or CH3 domain having one or more amino acid substitutions, deletions or additions relative to the corresponding wildtype domain, and/or having an amino acid sequence that is at least 90% identical, or more, to the corresponding wildtype sequence.

[0089] Also provided are antibodies and fusion proteins comprising an IgG1.3 heavy chain constant region. An antibody comprising an IgG1.3 heavy chain constant region may be an antagonist or an agonist antibody, such as an antagonist antibody to a checkpoint inhibitor or an agonist antibody to a checkpoint stimulator.

### Definitions

[0090] In order that the present description may be more readily understood, certain terms are first defined. Additional definitions are set forth throughout the detailed description.

[0091] The term “antibody” as used herein may include whole antibodies and any antigen binding fragments (e.g., an antigen binding fragment that includes a hinge, an antigen binding fragment that includes a hinge and a CH1 domain, an antigen binding fragment that includes a hinge and CH2 domain, or an antigen binding fragment that includes a hinge, a CH2 domain and a portion of a CH3 domain) or single chains thereof. In one embodiment, an “antibody” refers to a protein, e.g., a glycoprotein, comprising at least two heavy (H) chains and two light (L) chains inter-connected by disulfide bonds, or an antigen binding portion thereof. Each heavy chain is comprised of a heavy chain variable region (abbreviated herein as V_{H}) and a heavy chain constant region. In certain naturally occurring IgG, IgD and IgA antibodies, the heavy chain constant region is comprised of a hinge, a CH1 domain, a CH2 domain and a CH3 domain. In certain naturally occurring antibodies, each light chain is comprised of a light chain variable region (abbreviated herein as V_{L}) and a light chain constant region. The light chain constant region is comprised of one domain, CL. The V_{H} and V_{L} regions can be further subdivided into regions of hypervariability, termed complementarity determining regions (CDR), interspersed with regions that are more conserved, termed framework regions (FR). Each V_{H} and V_{L} is composed of three CDRs and four FRs, arranged from amino-terminus to carboxy-terminus in the following order: FR1, CDR1, FR2, CDR2, FR3, CDR3, FR4. The variable regions of the heavy and light chains contain a binding domain that interacts with an antigen. The constant regions of the antibodies may mediate the binding of the immunoglobulin to host tissues or factors, including various cells of the immune system (e.g., effector cells) and the first component (C1q) of the classical complement system.

[0092] An immunoglobulin may be from any of the commonly known isotypes, including but not limited to IgA, secretory IgA, IgG and IgM. The IgG isotype is divided in subclasses in certain species: IgG1, IgG2, IgG3 and IgG4 in humans, and IgG1, IgG2a, IgG2b and IgG3 in mice. In certain embodiments, the antibodies described herein are of the human IgG1 or IgG2 subtype. Immunoglobulins, e.g., human IgG1, exist in several allotypes, which differ from each other in at most a few amino acids. “Antibody” may include, by way of example, both naturally occurring and non-naturally occurring antibodies; monoclonal and polyclonal antibodies; chimeric and humanized antibodies; human and nonhuman antibodies; wholly synthetic antibodies; and single chain antibodies.

[0093] In certain embodiments, a heavy chain of an antibody comprises a C-terminal lysine; a C-terminal glycine (having lost the C-terminal lysine), or is lacking GK or is lacking K. When referring to antibodies comprising a modified heavy chain constant region described herein, the antibody may comprise a provided sequence having the C-terminal GK or K, or alternatively, lacking GK or K.

[0094] Amino acid numbering is according to the EU index as in Kabat. Kabat et al. (1991) Sequences of Proteins of Immunological Interest, National Institutes of Health, Bethesda, Md., and according to FIGS. 3c-3f of U.S. Pat. App. Pub. No. 2008/0248028.

[0095] The term “antigen-binding portion” of an antibody, as used herein, refers to one or more fragments of an antibody that retain the ability to specifically bind to an antigen. An antigen-binding portion of an antibody can be a “hinge containing antigen binding portion.” It has been shown that the antigen-binding function of an antibody can be performed by fragments of a full-length antibody. Examples of binding fragments encompassed within the term “antigen-binding portion” of an antibody described herein, include (i) a Fab fragment, a monovalent fragment consisting of the V_{L}, V_{H}, CL and CH1 domains; (ii) a F(ab′)₂ fragment, a bivalent fragment comprising two Fab fragments linked by a disulfide bridge at the hinge region; (iii) a Fd fragment consisting of the V_{H} and CH1 domains; (iv) a Fv fragment consisting of the V_{L} and V_{H} domains of a single arm of an antibody, (v) a dAb fragment (Ward et al., (1989) Nature 341:544-546), which consists of a V_{H} domain; and (vi) an isolated complementarity determining region (CDR) or (vii) a combination of two or more isolated CDRs which may optionally be joined by a synthetic linker. Furthermore, although the two domains of the Fv fragment, V_{L} and V_{H}, are coded for by separate genes, they can be joined, using recombinant methods, by a synthetic linker that enables them to be made as a single protein chain in which the V_{L} and V_{H} regions pair to form monovalent molecules known as single chain Fv (scFv); see e.g., Bird et al. (1988) Science 242:423-426; and Huston et al. (1988) Proc. Natl. Acad. Sci. USA 85:5879-5883). Such single chain antibodies are also intended to be encompassed within the term “antigen-binding portion” of an antibody. These and other potential constructs are described at Chan & Carter (2010) Nat. Rev. Immunol. 10:301. These antibody fragments are obtained using conventional techniques known to those with skill in the art, and the fragments are screened for utility in the same manner as are intact antibodies. Antigen-binding portions can be produced by recombinant DNA techniques, or by enzymatic or chemical cleavage of intact immunoglobulins.

[0096] A “CDR” of a variable domain are amino acid residues within the hypervariable region that are identified in accordance with the definitions of the Kabat, Chothia, the combination of both Kabat and Chothia, AbM, contact, and/or conformational definitions or any method of CDR determination well known in the art. Antibody CDRs may be identified as the hypervariable regions originally defined by Kabat et al. See, e.g., Kabat et al., 1992, Sequences of Proteins of Immunological Interest, 5th ed., Public Health Service, NIH, Washington D.C. The positions of the CDRs may also be identified as the structural loop structures originally described by Chothia and others. See, e.g., Chothia et al., 1989, Nature 342:877-883. Other approaches to CDR identification include the “AbM definition,” which is a compromise between Kabat and Chothia and is derived using Oxford Molecular's AbM antibody modeling software (now Accelrys®), or the “contact definition” of CDRs based on observed antigen contacts, set forth in MacCallum et al., 1996, J. Mol. Biol., 262:732-745. In another approach, referred to herein as the “conformational definition” of CDRs, the positions of the CDRs may be identified as the residues that make enthalpic contributions to antigen binding. See, e.g., Makabe et al., 2008, Journal of Biological Chemistry, 283:1156-1166. Still other CDR boundary definitions may not strictly follow one of the above approaches, but will nonetheless overlap with at least a portion of the Kabat CDRs, although they may be shortened or lengthened in light of prediction or experimental findings that particular residues or groups of residues or even entire CDRs do not significantly impact antigen binding. As used herein, a CDR may refer to CDRs defined by any approach known in the art, including combinations of approaches. The methods used herein may utilize CDRs defined according to any of these approaches. For any given embodiment containing more than one CDR, the CDRs may be defined in accordance with any of Kabat, Chothia, extended, AbM, contact, and/or conformational definitions.

[0097] As used herein, “isotype” refers to the antibody class (e.g., IgG1, IgG2, IgG3, IgG4, IgM, IgA1, IgA2, IgD, and IgE antibody) that is encoded by the heavy chain constant domain genes. The full-length amino acid sequence of each wild type human IgG constant region (including all domains, i.e., CH1 domain, hinge, CH2 domain, and CH3 domain) is cataloged in the UniProt database available on-line, e.g., as P01857 (IgG1), P01859 (IgG2), P01860 (IgG3), and P01861 (IgG4), or different allotypes thereof (SEQ ID NOs: 1, 6, 11, and 16, respectively). As used herein, a domain of a heavy chain constant region, e.g., the hinge, is of an “IgG1 isotype,” “IgG2 isotype,” “IgG3 isotype,” or “IgG4 isotype,” if the domain comprises the amino acid sequence of the corresponding domain of the respective isotype, or a variant thereof (that has a higher homology to the corresponding domain of the respective isotype than it does to that of the other isotypes).

[0098] “Allotype” refers to naturally occurring variants within a specific isotype group, which variants differ in a few amino acids (see, e.g., Jefferies et al. (2009) mAbs 1:1). Antibodies described herein may be of any allotype.

[0099] A “wildtype” protein or portion thereof is a version of the protein as it is found in nature. An amino acid sequence of a wildtype protein, e.g., a heavy chain constant region, is the amino acid sequence of the protein as it occurs in nature. Due to allotypic differences, there can be more than one amino acid sequence for a wildtype protein. For example, there are several allotypes of naturally occurring human IGg1 heavy chain constant regions (see, e.g., Jeffries et al. (2009) mAbs 1:1).

[0100] An “Fc region” (fragment crystallizable region) or “Fc domain” or “Fc” refers to the C-terminal region of the heavy chain of an antibody that mediates the binding of the immunoglobulin to host tissues or factors, including binding to Fc receptors located on various cells of the immune system (e.g., effector cells) or to the first component (C1q) of the classical complement system. Thus, an Fc region of an antibody of isotype IgG comprises the heavy chain constant region of the antibody excluding the first constant region immunoglobulin domain (CH1). In IgG, IgA and IgD antibody isotypes, the Fc region comprises C_{H2} and C_{H3} constant domains in each of the antibody's two heavy chains; IgM and IgE Fc regions comprise three heavy chain constant domains (C_{H} domains 2-4) in each polypeptide chain. For IgG, the Fc region comprises immunoglobulin domains consisting of the hinge, CH2 and CH3. For purposes herein, the Fc region is defined as starting at amino acid 216 and ending at amino acid 447, wherein the numbering is according to the EU index as in Kabat. Kabat et al. (1991) Sequences of Proteins of Immunological Interest, National Institutes of Health, Bethesda, Md., and according to FIGS. 3c-3f of U.S. Pat. App. Pub. No. 2008/0248028. The Fc may be a native (or naturally-occurring or wildtype) Fc, including any allotypic variant, or a variant Fc (e.g., a non-naturally occurring Fc), comprising, e.g., 1, 2, 3, 4, 5, 1-5, 1-10 or 5-10 or more amino acid mutations, e.g., substitutions, additions or deletions. For example, a variant Fc may comprise an amino acid sequence that is at least 75%, 80%, 85%, 90%, 95%, 96%, 97%, 98% or 99% identical to a wildtype Fc. Modified or mutated Fcs may have enhanced or reduced effector function and/or half-life. The CH2 and CH3 regions are the primary site of effector functions and FcRn binding. Fc may refer to this region in isolation or in the context of an Fc-comprising protein polypeptide such as a “binding protein comprising an Fc region,” also referred to as an “Fc fusion protein” (e.g., an antibody or immunoadhesin).

[0101] An “effector function” refers to the interaction of an antibody Fc region with an Fc receptor or ligand, or a biochemical event that results therefrom. Exemplary “effector functions” include C1q binding, complement dependent cytotoxicity (CDC), Fc receptor binding, FcγR-mediated effector functions such as ADCC and antibody dependent cell-mediated phagocytosis (ADCP), and downregulation of a cell surface receptor (e.g., the B cell receptor; BCR). Such effector functions generally require the Fc region to be combined with a binding domain (e.g., an antibody variable domain).

[0102] An “Fc receptor” or “FcR” is a receptor that binds to the Fc region of an immunoglobulin. FcRs that bind to an IgG antibody comprise receptors of the FcγR family, including allelic variants and alternatively spliced forms of these receptors. The FcγR family consists of three activating (FcγRI, FcγRIII, and FcγRIV in mice; FcγRIA, FcγRIIA, and FcγRIIIA in humans) and one inhibitory (FcγRIIB) receptor. Various properties of human FcγRs are summarized in Table 1. The majority of innate effector cell types coexpress one or more activating FcγR and the inhibitory FcγRIIB, whereas natural killer (NK) cells selectively express one activating Fc receptor (FcγRIII in mice and FcγRIIIA in humans) but not the inhibitory FcγRIIB in mice and humans. Human IgG1 binds to most human Fc receptors and is considered equivalent to murine IgG2a with respect to the types of activating Fc receptors that it binds to.

TABLE 1
Properties of human FcγRs

| | Allelic | Affinity for | Isotype | Cellular |
|---|---|---|---|---|
| Fcγ | variants | human IgG | preference | distribution |
| FcγRI | None | High | IgG1 = 3 > 4 > > 2 | Monocytes, macrophages, |
| (CD64) | described | (K_{D}~10 nM) | | activated neutrophils, dendritic cells? |
| FcγRIIA | H131 | Low to | IgG1 > 3 > 2 > 4 | Neutrophils, monocytes, |
| (CD32a) | | medium | | macrophages, eosinophils, |
| | R131 | Low | IgG1 > 3 > 4 > 2 | dendritic cells, platelets |
| FcγRIIIA | V158 | Medium | IgG1 = 3 >> 4 > 2 | NK cells, monocytes, |
| CD16a) | F158 | Low | IgG1 = 3 >> 4 > 2 | macrophages, mast cells, |
| | | | | eosinophils, dendritic cells? |
| FcγRIIB | I232 | Low | IgG1 = 3 = 4 > 2 | B cells, monocytes, |
| (CD32b) | T232 | Low | IgG1 = 3 = 4 > 2 | macrophages, dendritic cells, |
| | | | | mast cells |

[0103] A “hinge”, “hinge domain” or “hinge region” or “antibody hinge region” refers to the domain of a heavy chain constant region that joins the CH1 domain to the CH2 domain and includes the upper, middle, and lower portions of the hinge (Roux et al. J. Immunol. 1998 161:4083). The hinge provides varying levels of flexibility between the binding and effector regions of an antibody and also provides sites for intermolecular disulfide bonding between the two heavy chain constant regions. As used herein, a hinge starts at Glu216 and ends at Gly237 for all IgG isotypes (Roux et al., 1998 J Immunol 161:4083). The sequences of wildtype IgG1, IgG2, IgG3 and IgG4 hinges are shown in Table 2.

TABLE 2
Hinge region amino acids

| | C-terminal | | | |
|---|---|---|---|---|
| Ig Type | C_{H}1* | Upper Hinge | Middle Hinge | Lower Hinge |
| IgG1 | VDKRV | EPKSCDKTHT | CPPCP | APELLGG |
| | (SEQ ID | (SEQ ID NO: 59) | (SEQ ID NO: 64) | (SEQ ID NO: 70) |
| | NO: 57) | | | |
| IgG2 | VDKTV | ERK | CCVECPPCP | APPVAG |
| | (SEQ ID | (SEQ ID NO: 60) | (SEQ ID NO: 65) | (SEQ ID NO: 71) |
| | NO: 58) | | | |
| IgG3 (17-15-15- | VDKRV | ELKTPLGDTTHT | CPRCP (SEQ ID NO: 66) | APELLGG |
| 15) | | (SEQ ID NO: 61) | (EPKSCDTPPPCPRCP)₃ | |
| | | | (SEQ ID NO: 67) | |
| IgG3 (17-15-15) | VDKRV | ELKTPLGDTTHT | CPRCP | APELLGG |
| | | | (EPKSCDTPPPCPRCP)₂ | |
| IgG3 (17-15) | VDKRV | ELKTPLGDTTHT | CPRCP | APELLGG |
| | | | (EPKSCDTPPPCPRCP)₁ | |
| IgG3 (15-15-15) | VDKRV | EPKS | CDTPPPCPRCP | APELLGG |
| | | (SEQ ID NO: 62) | (SEQ ID NO: 68) | |
| | | | (EPKSCDTPPPCPRCP)₂ | |
| IgG3 (15) | VDKRV | EPKS | CDTPPPCPRCP | APELLGG |
| IgG4 | VDKRV | ESKYGPP | CPSCP (SEQ ID NO: 69) | APEFLGG |
| | | (SEQ ID NO: 63) | | |

*C-terminal amino acid sequences of the CH1 domains.

[0104] The term “hinge” includes wildtype hinges (such as those set forth in Table 3), as well as variants thereof (e.g., non-naturally-occurring hinges or modified hinges). For example, the term “IgG2 hinge” includes wildtype IgG2 hinge, as shown in Table 3, and variants having 1, 2, 3, 4, 5, 1-3, 1-5, 3-5 and/or at most 5, 4, 3, 2, or 1 mutations, e.g., substitutions, deletions or additions. Exemplary IgG2 hinge variants include IgG2 hinges in which 1, 2, 3 or all 4 cysteines (C219, C220, C226 and C229) are changed to another amino acid. In a specific embodiment, an IgG2 hinge comprises a C219X or C220X substitution, wherein X is any amino acid, except cysteine. An IgG2 hinge may comprise a substitution, which alone, or together with one or more substitutions in other regions of the heavy or light chain will cause the antibody comprising the hinge to adopt form A or B (see, e.g., Allen et al. (2009) Biochemistry 48:3755). In certain embodiments, a hinge is a hybrid hinge that comprises sequences from at least two isotypes. For example, a hinge may comprise the upper, middle or lower hinge from one isotype and the remainder of the hinge from one or more other isotypes. For example, a hinge can be an IgG2/IgG1 hinge, and may comprise, e.g., the upper and middle hinges of IgG2 and the lower hinge of IgG1. A hinge may have effector function or be deprived of effector function. For example, the lower hinge of wildtype IgG1 provides effector function.

[0105] A “non-IgG2” hinge refers to a hinge that is not of the IgG2 isotype.

[0106] The term “CH1 domain” refers to the heavy chain constant region linking the variable domain to the hinge in a heavy chain constant domain. As used herein, a CH1 domain starts at A118 and ends at V215. The term “CH1 domain” includes wildtype CH1 domains (such as having SEQ ID NO: 2 for IgG1 and SEQ ID NO: 7 for IgG2; Table 3), as well as variants thereof (e.g., non-naturally-occurring CH1 domains or modified CH1 domains). For example, the term “CH1 domain” includes wildtype CH1 domains and variants thereof having 1, 2, 3, 4, 5, 1-3, 1-5, 3-5 and/or at most 5, 4, 3, 2, or 1 mutations, e.g., substitutions, deletions or additions. Exemplary CH1 domains include CH1 domains with mutations that modify a biological activity of an antibody, such as ADCC, CDC or half-life. Modifications to the CH1 domain that affect a biological activity of an antibody are provided herein.

[0107] The term “CH2 domain” refers to the heavy chain constant region linking the hinge to the CH3 domain in a heavy chain constant domain. As used herein, a CH2 domain starts at P238 and ends at K340. The term “CH2 domain” includes wildtype CH2 domains (such as having SEQ ID NO: 4 for IgG1; Table 3), as well as variants thereof (e.g., non-naturally-occurring CH2 domains or modified CH2 domains). For example, the term “CH2 domain” includes wildtype CH2 domains and variants thereof having 1, 2, 3, 4, 5, 1-3, 1-5, 3-5 and/or at most 5, 4, 3, 2, or 1 mutations, e.g., substitutions, deletions or additions. Exemplary CH2 domains include CH2 domains with mutations that modify a biological activity of an antibody, such as ADCC, CDC or half-life. In certain embodiments, a CH2 domain comprises the substitutions A330S/P331S that reduce effector function. Other modifications to the CH2 domain that affect a biological activity of an antibody are provided herein.

[0108] The term “CH3 domain” refers to the heavy chain constant region that is C-terminal to the CH2 domain in a heavy chain constant domain. As used herein, a CH3 domain starts at G341 and ends at K447. The term “CH3 domain” includes wildtype CH3 domains (such as having SEQ ID NO: 5 for IgG1; Table 3), as well as variants thereof (e.g., non-naturally-occurring CH3 domains or modified CH3 domains). For example, the term “CH3 domain” includes wildtype CH3 domains and variants thereof having 1, 2, 3, 4, 5, 1-3, 1-5, 3-5 and/or at most 5, 4, 3, 2, or 1 mutations, e.g., substitutions, deletions or additions. Exemplary CH3 domains include CH3 domains with mutations that modify a biological activity of an antibody, such as ADCC, CDC or half-life. Modifications to the CH3 domain that affect a biological activity of an antibody are provided herein.

TABLE 3

| | | SEQ ID |
|---|---|---|
| Domain | Amino acid sequence | NO: |
| IgG1 CH1 | ASTKGPSVFPLAPSSKSTSGGTAALGCLVKDYFPEPVTVSWNSGALTSGVHTFPAVLQ | 2 |
| | SSGLYSLSSVVTVPSSSLGTQTYICNVNHKPSNTKVDKKV | |
| IgG1 Hinge | EPKSCDKTHTCPPCPAPELLGG | 3 |
| IgG1 CH2 | PSVFLFPPKPKDTLMISRTPEVTCVVVDVSHEDPEVKFNWYVDGVEVHNAKTKPREE | 4 |
| | QYNSTYRVVSVLTVLHQDWLNGKEYKCKVSNKALPAPIEKTISKAK | |
| IgG1 CH3 | GQPREPQVYTLPPSREEMTKNQVSLTCLVKGFYPSDIAVEWESNGQPENNYKTTPPVL | 5 |
| | DSDGSFFLYSKLTVDKSRWQQGNVFSCSVMHEALHNHYTQKSLSLSPGK | |
| IgG2 CH1 | ASTKGPSVFPLAPCSRSTSESTAALGCLVKDYFPEPVTVSWNSGALTSGVHTFPAVLQS | 7 |
| | SGLYSLSSVVTVPSSNFGTQTYTCNVDHKPSNTKVDKTV | |
| IgG2 Hinge | ERKCCVECPPCPAPPVAG | 8 |
| IgG2 CH2 | PSVFLFPPKPKDTLMISRTPEVTCVVVDVSHEDPEVQFNWYVDGVEVHNAKTKPREE | 9 |
| | QFNSTFRVVSVLTVVHQDWLNGKEYKCKVSNKGLPAPIEKTISKTK | |
| IgG2 CH3 | GQPREPQVYTLPPSREEMTKNQVSLTCLVKGFYPSDIAVEWESNGQPENNYKTTPPML | 10 |
| | DSDGSFFLYSKLTVDKSRWQQGNVFSCSVMHEALHNHYTQKSLSLSPGK | |
| IgG3 CH1 | ASTKGPSVFPLAPCSRSTSGGTAALGCLVKDYFPEPVTVSWNSGALTSGVHTFPAVLQ | 12 |
| | SSGLYSLSSVVTVPSSSLGTQTYTCNVNHKPSNTKVDKRV | |
| IgG3 Hinge | ELKTPLGDTTHTCPRCPE | 13 |
| IgG3 CH2 | PKSCDTPPPCPRCPEPKSCDTPPPCPRCPEPKSCDTPPPCPRCPAPELLGGPSVFLFPPKP | 14 |
| | KDTLMISRTPEVTCVVVDVSHEDPEVQFKWYVDGVEVHNAKTKPREEQYNSTFRVV | |
| | SVLTVLHQDWLNGKEYKCKVSNKALPAPIEKTISKTK | |
| IgG3 CH3 | GQPREPQVYTLPPSREEMTKNQVSLTCLVKGFYPSDIAVEWESSGQPENNYNTTPPML | 15 |
| | DSDGSFFLYSKLTVDKSRWQQGNIFSCSVMHEALHNRFTQKSLSLSPGK | |
| IgG4 CH1 | ASTKGPSVFPLAPCSRSTSESTAALGCLVKDYFPEPVTVSWNSGALTSGVHTFPAVLQS | 17 |
| | SGLYSLSSVVTVPSSSLGTKTYTCNVDHKPSNTKVDKRV | |
| IgG4 Hinge | ESKYGPPCPSCPAPEFLGG | 18 |
| IgG4 CH2 | PSVFLFPPKPKDTLMISRTPEVTCVVVDVSQEDPEVQFNWYVDGVEVHNAKTKPREE | |
| | QFNSTYRVVSVLTVLHQDWLNGKEYKCKVSNKGLPSSIEKTISKAK | |
| IgG4 CH3 | GQPREPQVYTLPPSQEEMTKNQVSLTCLVKGFYPSDIAVEWESNGQPENNYKTTPPVL | 20 |
| | DSDGSFFLYSRLTVDKSRWQEGNVFSCSVMHEALHNHYTQKSLSLSLGK | |

[0109] The term “monoclonal antibody,” as used herein, refers to an antibody that displays a single binding specificity and affinity for a particular epitope or a composition of antibodies in which all antibodies display a single binding specificity and affinity for a particular epitope. Typically such monoclonal antibodies will be derived from a single cell or nucleic acid encoding the antibody, and will be propagated without intentionally introducing any sequence alterations. Accordingly, the term “human monoclonal antibody” refers to a monoclonal antibody that has variable and optional constant regions derived from human germline immunoglobulin sequences. In one embodiment, human monoclonal antibodies are produced by a hybridoma, for example, obtained by fusing a B cell obtained from a transgenic or transchromosomal non-human animal (e.g., a transgenic mouse having a genome comprising a human heavy chain transgene and a light chain transgene), to an immortalized cell.

[0110] The term “recombinant human antibody,” as used herein, includes all human antibodies that are prepared, expressed, created or isolated by recombinant means, such as (a) antibodies isolated from an animal (e.g., a mouse) that is transgenic or transchromosomal for human immunoglobulin genes or a hybridoma prepared therefrom, (b) antibodies isolated from a host cell transformed to express the antibody, e.g., from a transfectoma, (c) antibodies isolated from a recombinant, combinatorial human antibody library, and (d) antibodies prepared, expressed, created or isolated by any other means that involve splicing of human immunoglobulin gene sequences to other DNA sequences. Such recombinant human antibodies comprise variable and constant regions that utilize particular human germline immunoglobulin sequences are encoded by the germline genes, but include subsequent rearrangements and mutations that occur, for example, during antibody maturation. As known in the art (see, e.g., Lonberg (2005) Nature Biotech. 23(9):1117-1125), the variable region contains the antigen binding domain, which is encoded by various genes that rearrange to form an antibody specific for a foreign antigen. In addition to rearrangement, the variable region can be further modified by multiple single amino acid changes (referred to as somatic mutation or hypermutation) to increase the affinity of the antibody to the foreign antigen. The constant region will change in further response to an antigen (i.e., isotype switch). Therefore, the rearranged and somatically mutated nucleic acid sequences that encode the light chain and heavy chain immunoglobulin polypeptides in response to an antigen may not be identical to the original germline sequences, but instead will be substantially identical or similar (i.e., have at least 80% identity).

[0111] A “human” antibody (HuMAb) refers to an antibody having variable regions in which both the framework and CDR regions are derived from human germline immunoglobulin sequences. Furthermore, if the antibody contains a constant region, the constant region also is derived from human germline immunoglobulin sequences. The antibodies described herein may include amino acid residues not encoded by human germline immunoglobulin sequences (e.g., mutations introduced by random or site-specific mutagenesis in vitro or by somatic mutation in vivo). However, the term “human antibody”, as used herein, is not intended to include antibodies in which CDR sequences derived from the germline of another mammalian species, such as a mouse, have been grafted onto human framework sequences. The terms “human” antibodies and “fully human” antibodies and are used synonymously.

[0112] A “humanized” antibody refers to an antibody in which some, most or all of the amino acids outside the CDR domains of a non-human antibody are replaced with corresponding amino acids derived from human immunoglobulins. In one embodiment of a humanized form of an antibody, some, most or all of the amino acids outside the CDR domains have been replaced with amino acids from human immunoglobulins, whereas some, most or all amino acids within one or more CDR regions are unchanged. Small additions, deletions, insertions, substitutions or modifications of amino acids are permissible as long as they do not abrogate the ability of the antibody to bind to a particular antigen. A “humanized” antibody retains an antigenic specificity similar to that of the original antibody.

[0113] A “chimeric antibody” refers to an antibody in which the variable regions are derived from one species and the constant regions are derived from another species, such as an antibody in which the variable regions are derived from a mouse antibody and the constant regions are derived from a human antibody.

[0114] A “bispecific” or “bifunctional antibody” is an artificial hybrid antibody having two different heavy/light chain pairs, giving rise to two antigen binding sites with specificity for different antigens. Bispecific antibodies can be produced by a variety of methods including fusion of hybridomas or linking of Fab′ fragments. See, e.g., Songsivilai & Lachmann, Clin. Exp. Immunol. 79:315-321 (1990); Kostelny et al., J. Immunol. 148, 1547-1553 (1992).

[0115] The phrases “an antibody recognizing an antigen” and “an antibody specific for an antigen” are used interchangeably herein with the term “an antibody which binds specifically to an antigen.”

[0116] An “isolated antibody,” as used herein, is intended to refer to an antibody that is substantially free of other antibodies having different antigenic specificities (e.g., an isolated antibody that specifically binds to antigen “x” is substantially free of antibodies that specifically bind antigens other than antigen “x”). An isolated antibody that specifically binds to an epitope of antigen “x” may, however, have cross-reactivity to other antigen “x” proteins from different species.

[0117] As used herein, an “agonist antibody” refers to an antibody that is an agonist of a co-stimulatory receptor, e.g., an antibody that is capable of boosting the immune system (or an immune response) of a subject by stimulating the activity of a protein that, in turn, stimulates an immune cell, e.g., a T cell, such as a B7-1, B7-2, CD28, 4-1BB (CD137), 4-1BBL, GITR, ICOS, ICOS-L, OX40, OX40L, CD70, or CD27, DR3, or CD28H protein. In certain embodiments, an agonist antibody is an antibody that enhances the activity of an inhibitory receptor, e.g., CTLA-4, PD-1, PD-L1, PD-L2, or LAG-3, TIM-3, Galectin 9, CEACAM-1, BTLA, CD69, Galectin-1, TIGIT, CD113, GPR56, VISTA, 2B4, CD48, GARP, CD73, PD1H, LAIR1, TIM-1, or TIM-4, and thereby inhibits an immune response.

[0118] As used herein, an “antagonist antibody” refers to an antibody that is an antagonist of an inhibitory signal on an immune cell, e.g., a T cell, e.g., an antibody that is capable of inhibiting or blocking a protein that inhibits T cell activation (e.g., immune checkpoint inhibitors), such as a CTLA-4, PD-1, PD-L1, PD-L2, or LAG-3, TIM-3, Galectin 9, CEACAM-1, BTLA, CD69, Galectin-1, TIGIT, CD113, GPR56, VISTA, 2B4, CD48, GARP, CD73, PD1H, LAIR1, TIM-1, or TIM-4, and thereby stimulates an immune response. In certain embodiments, an antagonist antibody is an antibody that inhibits the activity of a stimulatory receptor, e.g., B7-1, B7-2, CD28, 4-IBB (CD137), 4-1BBL, GITR, ICOS, ICOS-L, OX40, OX40L, CD70, or CD27, DR3, or CD28H, and thereby inhibits an immune response.

[0119] Both agonist and antagonist antibodies result in amplifying antigen-specific T cell responses, or in inhibiting antigen-specific T cell responses (immune checkpoint regulators).

[0120] The term “epitope” or “antigenic determinant” refers to a site on an antigen (e.g., GITR) to which an immunoglobulin or antibody specifically binds. Epitopes within protein antigens can be formed both from contiguous amino acids (usually a linear epitope) or noncontiguous amino acids juxtaposed by tertiary folding of the protein (usually a conformational epitope). Epitopes formed from contiguous amino acids are typically, but not always, retained on exposure to denaturing solvents, whereas epitopes formed by tertiary folding are typically lost on treatment with denaturing solvents. An epitope typically includes at least 3, 4, 5, 6, 7, 8, 9, 10, 11, 12, 13, 14 or 15 amino acids in a unique spatial conformation. Methods for determining what epitopes are bound by a given antibody (i.e., epitope mapping) are well known in the art and include, for example, immunoblotting and immunoprecipitation assays, wherein overlapping or contiguous peptides from are tested for reactivity with a given antibody. Methods of determining spatial conformation of epitopes include techniques in the art and those described herein, for example, x-ray crystallography, 2-dimensional nuclear magnetic resonance and HDX-MS (see, e.g., Epitope Mapping Protocols in Methods in Molecular Biology, Vol. 66, G. E. Morris, Ed. (1996)).

[0121] The term “naturally-occurring” as used herein as applied to an object refers to the fact that an object can be found in nature. For example, a polypeptide or polynucleotide sequence that is present in an organism (including viruses) that can be isolated from a source in nature and which has not been intentionally modified by man in the laboratory is naturally-occurring.

[0122] A “polypeptide” refers to a chain comprising at least two consecutively linked amino acid residues, with no upper limit on the length of the chain. One or more amino acid residues in the protein may contain a modification such as, but not limited to, glycosylation, phosphorylation or a disulfide bond. A “protein” may comprise one or more polypeptides.

[0123] The term “nucleic acid molecule,” as used herein, is intended to include DNA molecules and RNA molecules. A nucleic acid molecule may be single-stranded or double-stranded, and may be cDNA.

[0124] Also provided are “conservative sequence modifications” of the sequences set forth herein include, for example, conservative nucleotide and amino acid substitutions, as well as, nucleotide and amino acid additions and deletions. For example, modifications can be introduced into SEQ ID NOs: 1-275 by standard techniques known in the art, such as site-directed mutagenesis and PCR-mediated mutagenesis. Conservative sequence modifications include conservative amino acid substitutions, in which the amino acid residue is replaced with an amino acid residue having a similar side chain. Families of amino acid residues having similar side chains have been defined in the art. These families include amino acids with basic side chains (e.g., lysine, arginine, histidine), acidic side chains (e.g., aspartic acid, glutamic acid), uncharged polar side chains (e.g., glycine, asparagine, glutamine, serine, threonine, tyrosine, cysteine, tryptophan), nonpolar side chains (e.g., alanine, valine, leucine, isoleucine, proline, phenylalanine, methionine), beta-branched side chains (e.g., threonine, valine, isoleucine) and aromatic side chains (e.g., tyrosine, phenylalanine, tryptophan, histidine).

[0125] In one embodiment, amino acid sequence modifications to a heavy chain constant region or domain thereof do not modify or abrogate certain properties of the heavy chain constant region. These properties include, e.g., the rigidity or stiffness of the hinge, as well as agonist or antagonist activity of the antibody. In certain embodiments, amino acid sequence modifications to a heavy chain constant region or domain thereof do modify or abrogate certain properties of the heavy chain constant region.

[0126] Methods of identifying amino acid conservative substitutions that do and do not abrogate antibody and/or constant region properties are well-known in the art, e.g., as described herein in the Examples section.

[0127] For nucleic acids, the term “substantial homology” indicates that two nucleic acids, or designated sequences thereof, when optimally aligned and compared, are identical, with appropriate nucleotide insertions or deletions, in at least about 80% of the nucleotides, usually at least about 90% to 95%, and more preferably at least about 98% to 99.5% of the nucleotides. Alternatively, substantial homology exists when the segments will hybridize under selective hybridization conditions, to the complement of the strand.

[0128] For polypeptides, the term “substantial homology” indicates that two polypeptides, or designated sequences thereof, when optimally aligned and compared, are identical, with appropriate amino acid insertions or deletions, in at least about 80% of the amino acids, usually at least about 90% to 95%, and more preferably at least about 98% to 99.5% of the amino acids.

[0129] The percent identity between two sequences is a function of the number of identical positions shared by the sequences when the sequences are optimally aligned (i.e., % homology=# of identical positions/total # of positions×100), with optimal alignment determined taking into account the number of gaps, and the length of each gap, which need to be introduced for optimal alignment of the two sequences. The comparison of sequences and determination of percent identity between two sequences can be accomplished using a mathematical algorithm, as described in the non-limiting examples below.

[0130] The percent identity between two nucleotide sequences can be determined using the GAP program in the GCG software package (available at http://www.gcg.com), using a NWSgapdna.CMP matrix and a gap weight of 40, 50, 60, 70, or 80 and a length weight of 1, 2, 3, 4, 5, or 6. The percent identity between two nucleotide or amino acid sequences can also be determined using the algorithm of E. Meyers and W. Miller (CABIOS, 4:11-17 (1989)) which has been incorporated into the ALIGN program (version 2.0), using a PAM120 weight residue table, a gap length penalty of 12 and a gap penalty of 4. In addition, the percent identity between two amino acid sequences can be determined using the Needleman and Wunsch (J. Mol. Biol. (48):444-453 (1970)) algorithm which has been incorporated into the GAP program in the GCG software package (available at http://www.gcg.com), using either a Blossum 62 matrix or a PAM250 matrix, and a gap weight of 16, 14, 12, 10, 8, 6, or 4 and a length weight of 1, 2, 3, 4, 5, or 6.

[0131] The nucleic acid and protein sequences described herein can further be used as a “query sequence” to perform a search against public databases to, for example, identify related sequences. Such searches can be performed using the NBLAST and XBLAST programs (version 2.0) of Altschul, et al. (1990) J. Mol. Biol. 215:403-10. BLAST nucleotide searches can be performed with the NBLAST program, score=100, wordlength=12 to obtain nucleotide sequences homologous to the nucleic acid molecules described herein. BLAST protein searches can be performed with the XBLAST program, score=50, wordlength=3 to obtain amino acid sequences homologous to the protein molecules described herein. To obtain gapped alignments for comparison purposes, Gapped BLAST can be utilized as described in Altschul et al., (1997) Nucleic Acids Res. 25(17):3389-3402. When utilizing BLAST and Gapped BLAST programs, the default parameters of the respective programs (e.g., XBLAST and NBLAST) can be used. See www.ncbi.nlm.nih.gov.

[0132] As used herein, the term “antigen” refers to any natural or synthetic immunogenic substance, such as a protein, peptide, or hapten. An antigen may be a full-length or mature protein, or a fragment thereof.

[0133] An “immune response” refers to a biological response within a vertebrate against foreign agents, which response protects the organism against these agents and diseases caused by them. An immune response is mediated by the action of a cell of the immune system (for example, a T lymphocyte, B lymphocyte, natural killer (NK) cell, macrophage, eosinophil, mast cell, dendritic cell or neutrophil) and soluble macromolecules produced by any of these cells or the liver (including antibodies, cytokines, and complement) that results in selective targeting, binding to, damage to, destruction of, and/or elimination from the vertebrate's body of invading pathogens, cells or tissues infected with pathogens, cancerous or other abnormal cells, or, in cases of autoimmunity or pathological inflammation, normal human cells or tissues. An immune reaction includes, e.g., activation or inhibition of a T cell, e.g., an effector T cell or a Th cell, such as a CD4+ or CD8+ T cell, or the inhibition of a Treg cell.

[0134] An “immunomodulator” or “immunoregulator” refers to an agent, e.g., a component of a signaling pathway, that may be involved in modulating, regulating, or modifying an immune response. “Modulating,” “regulating,” or “modifying” an immune response refers to any alteration in a cell of the immune system or in the activity of such cell (e.g., an effector T cell). Such modulation includes stimulation or suppression of the immune system which may be manifested by an increase or decrease in the number of various cell types, an increase or decrease in the activity of these cells, or any other changes which can occur within the immune system. Both inhibitory and stimulatory immunomodulators have been identified, some of which may have enhanced function in a tumor microenvironment. In preferred embodiments, the immunomodulator is located on the surface of a T cell. An “immunomodulatory target” or “immunoregulatory target” is an immunomodulator that is targeted for binding by, and whose activity is altered by the binding of, a substance, agent, moiety, compound or molecule. Immunomodulatory targets include, for example, receptors on the surface of a cell (“immunomodulatory receptors”) and receptor ligands (“immunomodulatory ligands”).

[0135] “Immunotherapy” refers to the treatment of a subject afflicted with, or at risk of contracting or suffering a recurrence of, a disease by a method comprising inducing, enhancing, suppressing or otherwise modifying an immune response.

[0136] “Immunostimulating therapy” or “immunostimulatory therapy” refers to a therapy that results in increasing (inducing or enhancing) an immune response in a subject for, e.g., treating cancer.

[0137] “Potentiating an endogenous immune response” means increasing the effectiveness or potency of an existing immune response in a subject. This increase in effectiveness and potency may be achieved, for example, by overcoming mechanisms that suppress the endogenous host immune response or by stimulating mechanisms that enhance the endogenous host immune response.

[0138] “T effector” (“T_{eff}”) cells refers to T cells (e.g., CD4+ and CD8+ T cells) with cytolytic activities as well as T helper (Th) cells, which secrete cytokines and activate and direct other immune cells, but does not include regulatory T cells (Treg cells).

[0139] As used herein, the term “linked” refers to the association of two or more molecules. The linkage can be covalent or non-covalent. The linkage also can be genetic (i.e., recombinantly fused). Such linkages can be achieved using a wide variety of art recognized techniques, such as chemical conjugation and recombinant protein production.

[0140] As used herein, “administering” refers to the physical introduction of a composition comprising a therapeutic agent to a subject, using any of the various methods and delivery systems known to those skilled in the art. Preferred routes of administration for antibodies described herein include intravenous, intraperitoneal, intramuscular, subcutaneous, spinal or other parenteral routes of administration, for example by injection or infusion. The phrase “parenteral administration” as used herein means modes of administration other than enteral and topical administration, usually by injection, and includes, without limitation, intravenous, intraperitoneal, intramuscular, intraarterial, intrathecal, intralymphatic, intralesional, intracapsular, intraorbital, intracardiac, intradermal, transtracheal, subcutaneous, subcuticular, intraarticular, subcapsular, subarachnoid, intraspinal, epidural and intrasternal injection and infusion, as well as in vivo electroporation. Alternatively, an antibody described herein can be administered via a non-parenteral route, such as a topical, epidermal or mucosal route of administration, for example, intranasally, orally, vaginally, rectally, sublingually or topically. Administering can also be performed, for example, once, a plurality of times, and/or over one or more extended periods.

[0141] As used herein, the term “T cell-mediated response” refers to a response mediated by T cells, including effector T cells (e.g., CD8⁺ cells) and helper T cells (e.g., CD4⁺ cells). T cell mediated responses include, for example, T cell cytotoxicity and proliferation.

[0142] As used herein, the term “cytotoxic T lymphocyte (CTL) response” refers to an immune response induced by cytotoxic T cells. CTL responses are mediated primarily by CD8⁺ T cells.

[0143] As used herein, the terms “inhibits” or “blocks” (e.g., referring to inhibition/blocking of a ligand to its receptor or to a subsequent intracellular response) are used interchangeably and encompass both partial and complete inhibition/blocking. In some embodiments, the antibody inhibits binding by at least about 50%, for example, at least about 60%, 70%, 80%, 90%, 95%, 99%, or 100%, determined, e.g., as further described herein.

[0144] As used herein, “cancer” refers a broad group of diseases characterized by the uncontrolled growth of abnormal cells in the body. Unregulated cell division may result in the formation of malignant tumors or cells that invade neighboring tissues and may metastasize to distant parts of the body through the lymphatic system or bloodstream.

[0145] The terms “treat,” “treating,” and “treatment,” as used herein, refer to any type of intervention or process performed on, or administering an active agent to, the subject with the objective of reversing, alleviating, ameliorating, inhibiting, or slowing down or preventing the progression, development, severity or recurrence of a symptom, complication, condition or biochemical indicia associated with a disease. Prophylaxis refers to administration to a subject who does not have a disease, to prevent the disease from occurring or minimize its effects if it does.

[0146] A “hematological malignancy” includes a lymphoma, leukemia, myeloma or a lymphoid malignancy, as well as a cancer of the spleen and the lymph nodes. Exemplary lymphomas include both B cell lymphomas and T cell lymphomas. B-cell lymphomas include both Hodgkin's lymphomas and most non-Hodgkin's lymphomas. Non-limiting examples of B cell lymphomas include diffuse large B-cell lymphoma, follicular lymphoma, mucosa-associated lymphatic tissue lymphoma, small cell lymphocytic lymphoma (overlaps with chronic lymphocytic leukemia), mantle cell lymphoma (MCL), Burkitt's lymphoma, mediastinal large B cell lymphoma, Waldenström macroglobulinemia, nodal marginal zone B cell lymphoma, splenic marginal zone lymphoma, intravascular large B-cell lymphoma, primary effusion lymphoma, lymphomatoid granulomatosis. Non-limiting examples of T cell lymphomas include extranodal T cell lymphoma, cutaneous T cell lymphomas, anaplastic large cell lymphoma, and angioimmunoblastic T cell lymphoma. Hematological malignancies also include leukemia, such as, but not limited to, secondary leukemia, chronic lymphocytic leukemia, acute myelogenous leukemia, chronic myelogenous leukemia, and acute lymphoblastic leukemia. Hematological malignancies further include myelomas, such as, but not limited to, multiple myeloma and smoldering multiple myeloma. Other hematological and/or B cell- or T-cell-associated cancers are encompassed by the term hematological malignancy.

[0147] The term “effective dose” or “effective dosage” is defined as an amount sufficient to achieve or at least partially achieve a desired effect. A “therapeutically effective amount” or “therapeutically effective dosage” of a drug or therapeutic agent is any amount of the drug that, when used alone or in combination with another therapeutic agent, promotes disease regression evidenced by a decrease in severity of disease symptoms, an increase in frequency and duration of disease symptom-free periods, or a prevention of impairment or disability due to the disease affliction. A “prophylactically effective amount” or a “prophylactically effective dosage” of a drug is an amount of the drug that, when administered alone or in combination with another therapeutic agent to a subject at risk of developing a disease or of suffering a recurrence of disease, inhibits the development or recurrence of the disease. The ability of a therapeutic or prophylactic agent to promote disease regression or inhibit the development or recurrence of the disease can be evaluated using a variety of methods known to the skilled practitioner, such as in human subjects during clinical trials, in animal model systems predictive of efficacy in humans, or by assaying the activity of the agent in in vitro assays.

[0148] By way of example, an anti-cancer agent is a drug that slows cancer progression or promotes cancer regression in a subject. In preferred embodiments, a therapeutically effective amount of a drug promotes cancer regression to the point of eliminating the cancer. “Promoting cancer regression” means that administering an effective amount of the drug, alone or in combination with an anti-neoplastic agent, results in a reduction in tumor growth or size, necrosis of the tumor, a decrease in severity of at least one disease symptom, an increase in frequency and duration of disease symptom-free periods, a prevention of impairment or disability due to the disease affliction, or otherwise amelioration of disease symptoms in the patient. Pharmacological effectiveness refers to the ability of the drug to promote cancer regression in the patient. Physiological safety refers to an acceptably low level of toxicity, or other adverse physiological effects at the cellular, organ and/or organism level (adverse effects) resulting from administration of the drug.

[0149] By way of example for the treatment of tumors, a therapeutically effective amount or dosage of the drug preferably inhibits cell growth or tumor growth by at least about 20%, more preferably by at least about 40%, even more preferably by at least about 60%, and still more preferably by at least about 80% relative to untreated subjects. In the most preferred embodiments, a therapeutically effective amount or dosage of the drug completely inhibits cell growth or tumor growth, i.e., preferably inhibits cell growth or tumor growth by 100%. The ability of a compound to inhibit tumor growth can be evaluated using the assays described infra. Alternatively, this property of a composition can be evaluated by examining the ability of the compound to inhibit cell growth, such inhibition can be measured in vitro by assays known to the skilled practitioner. In other preferred embodiments described herein, tumor regression may be observed and may continue for a period of at least about 20 days, more preferably at least about 40 days, or even more preferably at least about 60 days.

[0150] The terms “patient” and “subject” refer to any human or non-human animal that receives either prophylactic or therapeutic treatment. For example, the methods and compositions described herein can be used to treat a subject having cancer. The term “non-human animal” includes all vertebrates, e.g., mammals and non-mammals, such as non-human primates, sheep, dog, cow, chickens, amphibians, reptiles, etc.

[0151] Various aspects described herein are described in further detail in the following subsections.

### I. Modified Heavy Chain Constant Regions Enhancing or Altering a Biological Property

[0152] Described herein are “modified heavy chain constant regions,” which, when present in antibodies, enhance or alter certain biological properties or features of the antibodies, relative to the same antibodies that do not have a modified heavy chain constant region, such as antibodies that contain a non-IgG2 hinge, e.g., IgG1 antibodies. Enhanced or altered biological properties of antibodies include:

[0153] (a) increased or altered internalization by a cell;

[0154] (b) increased or altered agonist activity;

[0155] (c) increased or altered antagonist or blocking activity;

[0156] (d) enhanced ADCC;

[0157] (d) generation of a new property;

[0158] (e) increased or altered signal transduction;

[0159] (f) formation of larger antibody/antigen cross-linked complexes;

[0160] (g) increased clustering or oligomerization of the target cell surface molecule;

[0161] (h) increased stimulation or enhancement of an immune response; and/or

[0162] (i) increased inhibition of an immune response.

[0163] In certain embodiments, an antibody comprising a modified heavy chain constant region mediates antibody dependent receptor (or ligand or surface molecule) internalization more effectively, e.g., the antibody internalizes a target or surface molecule (e.g., a receptor or ligand) and/or is internalized itself with a higher rate and/or extent of internalization into a cell after the antibody binds to its target on the cell membrane, relative to the same antibody that does not comprise a modified heavy chain constant region, and comprises, e.g., an IgG1 heavy chain. The rate and extent of internalization of an antibody can be determined, e.g., as shown in the Examples. The rate of internalization, as measured, e.g., by T_{1/2} of internalization, e.g., as shown in the Examples, can be enhanced or increased by at least 10%, 30%, 50%, 75%, 2 fold, 3 fold, 5 fold or more, resulting in a reduction of the T_{1/2} by at least 10%, 30%, 50%, 75%, 2 fold, 3 fold, 5 fold or more. For example, instead of having a T_{1/2} of 10 minutes, a modified heavy chain constant region may increase the rate of internalization and thereby reduce the T_{1/2} to 5 minutes (i.e., a two fold increase in rate of internalization or a two-fold decrease in T_{1/2}). “T_{1/2}” is defined as the time at which half of the maximal internalization is achieved, as measured from the time the antibody is added to the cells. In certain embodiments, T_{1/2} is reduced by at least 10 minutes, 30 minutes, or 1 hour. The maximal level of internalization can be the level of internalization at the plateau of a graph representing the internalization plotted against antibody concentrations or time. A modified heavy chain constant region may increase the maximal level of internalization of an antibody by at least 10%, 30%, 50%, 75%, 2 fold, 3 fold, 5 fold or more. Another way of comparing internalization efficacies of different antibodies, such as an antibody with, and the same antibody without, a modified heavy chain constant region, is by comparing their level of internalization at a given antibody concentration (e.g., 100 nM) and/or at a given time (e.g., 2 minutes, 5 minutes, 10 minutes or 30 minutes). Comparing levels of internalization can also be done by comparing the EC50 levels of internalization. The level of internalization of one antibody can be defined relative to that of a given (reference) antibody, e.g., an antibody described herein, e.g., 11F11 or CD73.4-IgG2CS-IgG1, and, can be indicated as a percentage of the value obtained with the given (reference) antibody. The extent of internalization can be enhanced by at least 10%, 30%, 50%, 75%, 2 fold, 3 fold, 5 fold or more, as compared by any one of these methods.

[0164] In certain embodiments, an antibody comprising a modified heavy chain constant region has more potent agonist activity, relative to the same antibody that does not comprise a modified heavy chain constant region, and comprises, e.g., an IgG1 heavy chain. In certain embodiments, the enhanced agonist activity enhances the stimulatory activity of a target molecule, e.g., GITR, or other moleceules that stimulate or co-stimulate an immune response, e.g., T cell activity. In certain embodiments, the enhanced agonist activity enhances the inhibitory activity of a target molecule that inhibits an immune response, e.g., T cell activity (e.g., a checkpoint inhibitor). The enhanced agonist activity of an antibody that modulates T cell activity can be determined, e.g., as shown in the Examples, e.g., by measuring the level of IFN-γ or IL-2 secretion from T cells that are contacted with the antibody. The agonist activity of an antibody that binds to a stimulatory target may be enhanced by at least 10%, 30%, 50%, 75%, 2 fold, 3 fold, 5 fold or more as defined by increased cytokine release or increased proliferation of effector T cells; reduced T regulatory cell activity if engagement on Tregs reduces Treg function; or increased depletion of Tregs. For example, the amount of IFN-γ or IL-2 secreted from T cells stimulated with an antibody that binds to a stimulatory target comprising a modified heavy chain constant region may be at least 10%, 30%, 50%, 75%, 2 fold, 3 fold, 5 fold or more higher than that of T cells simulated with the same antibody that does not comprise a modified heavy chain constant region. The agonist activity of an antibody that binds to an inhibitory target may be enhanced by at least 10%, 30%, 50%, 75%, 2 fold, 3 fold, 5 fold or more as defined by reduced cytokine release or reduced proliferation of effector T cells; increased T regulatory cell activity; or decreased depletion of Tregs. For example, the amount of IFN-γ or IL-2 secreted from T cells stimulated with an antibody that binds to an inhibitory target comprising a modified heavy chain constant region may be at least 10%, 30%, 50%, 75%, 2 fold, 3 fold, 5 fold or more lower than that of T cells simulated with the same antibody that does not comprise a modified heavy chain constant region.

[0165] In certain embodiments, an antibody comprising a modified heavy chain constant region has more potent antagonist or blocking activity, relative to the same antibody that does not comprise a modified heavy chain constant region, and comprises, e.g., an IgG1 heavy chain. The enhanced antagonist activity of an antibody can be determined, e.g., by measuring cytokine release and/or proliferation in contexts that include conditions of T cell activation. The antagonist activity may be enhanced by at least 10%, 30%, 50%, 75%, 2 fold, 3 fold, 5 fold or more.

[0166] In certain embodiments, an antibody comprising a modified heavy chain constant region has enhanced ADCC activity, relative to the same antibody that does not comprise a modified heavy chain constant region, and comprises, e.g., an IgG1 heavy chain. Enhanced ADCC may be determined according to methods known in the art. ADCC may be enhanced by at least 10%, 30%, 50%, 2 fold, 5 fold or more.

[0167] In certain embodiments, an antibody comprising a modified heavy chain constant region has the ability to form larger antibody/antigen cross-linked complexes, relative to the same antibody that does not comprise a modified heavy chain constant region, and comprises, e.g., an IgG1 heavy chain. The ability to form complexes can be determined as described, e.g., in the Examples. Antibody/antigen complexes formed with an antibody that comprises a modified heavy chain constant region may be at least 50%, 2 fold, 3 fold, 5 fold or 10 folder larger than complexes formed with the same antibody that does not comprise a modified heavy chain constant region. In certain embodiments, complexes of at least 2,000 kDa; 3,000 kDa; 5000 kDa; 10,000 kDa, 50,000 kDa or 100,000 kDa are formed with antibodies having a modified heavy chain constant region.

[0168] In certain embodiments, an antibody comprising a modified heavy chain constant region triggers more clustering or oligomerization of the target molecule on the cell surface, relative to the same antibody that does not comprise a modified heavy chain constant region, and comprises, e.g., an IgG1 heavy chain. The extent of clustering an oligomerization can be determined, e.g., by measuring the size of antibody/antigen complexes.

[0169] In certain embodiments, an antibody comprising a modified heavy chain constant region transduces a higher level or different type of signaling or signal transduction, relative to the same antibody that does not comprise a modified heavy chain constant region, and comprises, e.g., an IgG1 heavy chain. Signal transduction can be monitored by determining the level of activation of one or more proteins in signal transduction pathways. In certain embodiments, signal transduction is determined by measuring the activity (or phosphorylation) of a signal transduction protein, e.g., NFkB or p38, as described, e.g., in the Examples. Signal transduction triggered by an antibody that comprises a modified heavy chain constant region may be higher or lower by at least 10%, 20%, 50%, 2 fold, 5 fold or more than signal transduction with the same antibody that does not comprise a modified heavy chain constant region. For example, signal transduction triggered by an antibody that binds to a stimulatory molecule (e.g., GITR) and comprises a modified heavy chain constant region may be enhanced by at least 10% relative to that obtained with the same antibody having an IgG1 heavy chain. For example, EC50 of NFkB or p38 activity (e.g., phosphorylation) may be reduced by at least 50%, 2 fold, 5 fold or more.

[0170] In certain embodiments, an antibody comprising a modified heavy chain constant region has an increased ability to stimulate or enhance an immune response or the immune system, relative to the same antibody that does not comprise a modified heavy chain constant region, and comprises, e.g., an IgG1 heavy chain. An increased ability to stimulate an immune response or the immune system, can result from an enhanced agonist activity of T cell costimulatory receptors and/or an enhanced antagonist activity of inhibitory receptors. An increased ability to stimulate an immune response or the immune system may be reflected by a fold increase of the EC50 or maximal level of activity in an assay that measures an immune response, e.g., an assay that measures changes in cytokine or chemokine release, cytolytic activity (determined directly on target cells or indirectly via detecting CD107a or granzymes) and proliferation. The ability to stimulate an immune response or the immune system activity may be enhanced by at least 10%, 30%, 50%, 75%, 2 fold, 3 fold, 5 fold or more.

[0171] In certain embodiments, an antibody comprising a modified heavy chain constant region has an increased anti-proliferative or anti-tumor activity, relative to the same antibody that does not comprise a modified heavy chain constant region, and comprises, e.g., an IgG1 heavy chain. The enhanced anti-tumor activity of an antibody can be determined, e.g., by the growth of a tumor in an animal that has been treated with the antibody. The anti-tumor activity may be enhanced by at least 10%, 30%, 50%, 75%, 2 fold, 3 fold, 5 fold or more. Anti-tumor activity can be measured, e.g., as a decrease in tumor burden, e.g., manifested by decreased tumor growth kinetics and complete tumor regressions.

[0172] In certain embodiments, an antibody comprising a modified heavy chain constant region has an increased ability to inhibit or suppress an immune response or the immune system, relative to the same antibody that does not comprise a modified heavy chain constant region, and comprises, e.g., an IgG1 heavy chain. An increased ability to inhibit or suppress an immune response or the immune system, can result from an enhanced antagonist activity of T cell costimulatory receptors and/or an enhanced agonist activity of inhibitory receptors. An increased ability to stimulate an immune response or the immune system may be reflected by a fold increase of the EC50 or maximal level of activity in an assay that measures an immune response, e.g., an assay that measures changes in cytokine or chemokine release, cytolytic activity (determined directly on target cells or indirectly via detecting CD107a or granzymes) and proliferation. The ability to inhibit or suppress an immune response or the immune system activity may be enhanced by at least 10%, 30%, 50%, 75%, 2 fold, 3 fold, 5 fold or more.

[0173] In certain embodiments, a modified heavy chain constant region or portion thereof, e.g., the hinge, is more rigid, compared to other heavy chain constant regions, e.g., IgG1, IgG2, IgG3 and/or IgG4 heavy chain constant regions. For example, a modified heavy chain constant region is a non-naturally occurring heavy chain constant region that is more rigid than, or has a portion, e.g., the hinge, that is more rigid than a naturally-occurring heavy chain constant region or hinge thereof. The rigidity of a heavy chain constant region or portion thereof, such as the hinge, can be determined by e.g., by computer modeling, electron microscopy, spectroscopy such as Nuclear Magnetic Resonance (NMR), X-ray crystallography (B-factors), or Sedimentation Velocity Analytical ultracentrifugation (AUC) to measure or compare the radius of gyration of antibodies comprising the hinge. Alternatively, the rigidity of a heavy chain constant region or portion thereof can be determined by measuring the sizes of antibody/antigen complexes, e.g., as further described herein.

[0174] An antibody comprising a modified heavy chain constant region and exhibiting an enhanced functional property as determined according to methodologies known in the art and described herein, will be understood to relate to a statistically significant difference in the particular activity relative to that seen in the same antibody but with a different heavy chain constant region.

[0175] In certain embodiments, a modified heavy chain constant region comprises a hinge of the IgG2 isotype (an “IgG2 hinge”) and a CH1, CH2 and CH3 domain. In certain embodiments, a modified heavy chain constant region comprises an IgG2 hinge and a CH1, CH2 and CH3 domain, wherein at least one of the CH1, CH2 and CH3 domains is not of the IgG2 isotype. In certain embodiments, a modified heavy chain constant region comprises an IgG2 hinge and a CH1, CH2 and CH3 domain, wherein the heavy chain constant domain is not a wild-type IgG2 constant region or is not an IgG2 constant region with a mutation at amino acid 219 or 220. The IgG2 hinge may be a wildtype IgG2 hinge, e.g., a wildtype human IgG2 hinge (e.g., having SEQ ID NO: 8) or a variant thereof, provided that the IgG2 hinge retains the ability to confer to the antibody an enhanced activity relative to that of the same antibody that comprises a non-IgG2 hinge or comprises an IgG1 heavy chain. In certain embodiments, an IgG2 hinge variant retains similar rigidity or stiffness to that of a wildtype IgG2 hinge. The rigidity of a hinge can be determined, e.g., by computer modeling, electron microscopy, spectroscopy such as Nuclear Magnetic Resonance (NMR), X-ray crystallography (B-factors), or Sedimentation Velocity Analytical ultracentrifugation (AUC) to measure or compare the radius of gyration of antibodies comprising the hinge. A hinge has similar or higher rigidity relative to that of another hinge if an antibody comprising the hinge has a value obtained from one of the tests described in the previous sentence that differs from the value of the same antibody with a different hinge, e.g., an IgG1 hinge, in less than 5%, 10%, 25%, 50%, 75%, or 100%. A person of skill in the art would be able to determine from the tests whether a hinge has at least similar rigidity to that of another hinge by interpreting the results of these tests.

[0176] An exemplary human IgG2 hinge variant is an IgG2 hinge that comprises a substitution of one or more of the four cysteine residues (i.e., C219, C220, C226 and C229) with another amino acid. A cysteine may be replaced by a serine. An exemplary IgG2 hinge is a human IgG2 hinge comprising a C219X mutation or a C220X mutation, wherein X is any amino acid exept cysteine. In a certain embodiments, an IgG2 hinge does not comprise both a C219X and a C220X substitution. In certain embodiments, an IgG2 hinge comprises C219S or C220S, but not both C219S and C22S. Other IgG2 hinge variants that may be used include human IgG2 hinges comprising a C220, C226 and/or C229 substitution, e.g., a C220S, C226S or C229S mutation (which may be combined with a C219S mutation). An IgG2 hinge may also be an IgG2 hinge in which a portion of the hinge is that of another isotype (i.e., it is a chimeric or hybrid hinge), provided that the rigidity of the chimeric hinge is at least similar to that of a wildtype IgG2 hinge. For example, an IgG2 hinge may be an IgG2 hinge in which the lower hinge (as defined in Table 2) is of an IgG1 isotype, and is, e.g., a wildtype IgG1 lower hinge.

[0177] A “hybrid” or “chimeric” hinge is referred to as being of a specific isotype if more than half of the consecutive amino acids of the hinge are from that isotype. For example, a hinge having an upper and middle hinge of IgG2 and the lower hinge of IgG1 is considered to be an IgG2 hybrid hinge.

[0178] In certain embodiments, an antibody comprises a modified heavy chain constant region that comprises an IgG2 hinge comprising a sequence set forth in Table 4, e.g., one of the following amino acid sequences: 8, 21, 22, 23, 126-129, and 134-147. In certain embodiments, the hinge comprises SEQ ID NO: 8, 21, 126, 134 or 135, wherein 1, 2, 3 or all 4 amino acids P233, V234, A235 and G237 (corresponding to the C-terminal 4 amino acids “PVAG” (SEQ ID NO: 148) are deleted or substituted with another amino acid, e.g., the amino acids of the C-terminus of the IgG1 hinge (ELLG (SEQ ID NO: 149) or ELLGG (SEQ ID NO: 150). In certain embodiments, the hinge comprises SEQ ID NO: 8, 21, 126, 134 or 135, wherein V234, A235 and G237 are deleted or substituted with another amino acid. In certain embodiments, the hinge comprises SEQ ID NO: 8, 21, 126, 134 or 135, wherein A235 and G237 are deleted or substituted with another amino acid. In certain embodiments, the hinge comprises SEQ ID NO: 8, 21, 126, 134 or 135, wherein G237 is deleted or substituted with another amino acid. In certain embodiments, the hinge comprises SEQ ID NO: 8, 21, 126, 134 or 135, wherein V234 and A235 are deleted or substituted with another amino acid. Substitution of PVAG (SEQ ID NO: 143) in an IgG2 with the corresponding amino acids of an IgG1 hinge, i.e., (ELLG (SEQ ID NO: 144) or ELLGG (SEQ ID NO: 145)) to obtain a hybrid hinge having SEQ ID NO: 22 or 138 or variants thereof (see, e.g., Table 4) provides a hinge having the advantages of an IgG2 hinge and the effector function of IgG1 hinges.

[0179] In certain embodiments, a modified heavy chain constant region comprises a hinge that consists of or consists essentially of one of the sequences in Table 4, e.g., SEQ ID NOs: 8, 21, 22, 23, 127-132, and 134-141, and, in certain embodiments, does not comprise additional hinge amino acid residues.

TABLE 4
Exemplary IgG2 hinges

| IgG2 Hinge description | Amino acid sequence | SEQ ID NO: |
|---|---|---|
| Wildtype IgG2 | ERKCCVECPPCPAPPVAG | 8 |
| IgG2 with C219S | ERKSCVECPPCPAPPVAG | 21 |
| IgG2 with C220S | ERKCSVECPPCPAPPVAG | 126 |
| IgG2 with C219X | ERKXCVECPPCPAPPVAG | 134 |
| IgG2 with C220X | ERKCXVECPPCPAPPVAG | 135 |
| Wildtype IgG2 with C-terminal X | ERKCCVECPPCPAPPVAGX | 143 |
| IgG2 with C219S with C-terminal X | ERKSCVECPPCPAPPVAGX | 144 |
| IgG2 with C220S with C-terminal X | ERKCSVECPPCPAPPVAGX | 145 |
| IgG2 with C219X with C-terminal X | ERKXCVECPPCPAPPVAGX | 146 |
| IgG2 with C220X with C-terminal X | ERKCXVECPPCPAPPVAGX | 147 |
| IgG2/IgG1 hybrid | ERKCCVECPPCPAPELLGG | 22 |
| IgG2/IgG1 hybrid with C219S | ERKSCVECPPCPAPELLGG | 23 |
| IgG2/IgG1 hybrid with C220S | ERKCSVECPPCPAPELLGG | 127 |
| IgG2/IgG1 hybrid with C219X | ERKXCVECPPCPAPELLGG | 136 |
| IgG2/IgG1 hybrid with C220X | ERKCXVECPPCPAPELLGG | 137 |
| IgG2/IgG1 hybrid deltaG | ERKCCVECPPCPAPELLG | 138 |
| IgG2/IgG1 hybrid with C219S deltaG | ERKSCVECPPCPAPELLG | 139 |
| IgG2/IgG1 hybrid with C220S deltaG | ERKCSVECPPCPAPELLG | 140 |
| IgG2/IgG1 hybrid with C219X deltaG | ERKXCVECPPCPAPELLG | 141 |
| IgG2/IgG1 hybrid with C220X deltaG | ERKCXVECPPCPAPELLG | 142 |
| Truncated wiltype IgG2 | ERKCCVECPPCPAP | 128 |
| Truncated wiltype IgG2 with C219S | ERKSCVECPPCPAP | 129 |
| Truncated wiltype IgG2 with C220S | ERKCSVECPPCPAP | 130 |
| Truncated wiltype IgG2 with C219X | ERKXCVECPPCPAP | 131 |
| Truncated wiltype IgG2 with C220X | ERKCXVECPPCPAP | 132 |

X is any amino acid, except cysteine.

[0180] In certain embodiments, a modified heavy chain constant region comprises an IgG2 hinge set forth in Table 4, in which 1-5, 1-3, 1-2 or 1 amino acid is inserted between amino acid residues CVE and CPP. In certain embodiments, THT or GGG is inserted. In certain embodiments, 1, 1-2 or 1-3 amino acids may be inserted between the hinge and CH2 domain. For example, an additional glycine may be inserted between the hinge and the CH2 domain.

[0181] In certain embodiments a modified heavy chain constant region is an IgG1 or IgG2 constant region, wherein the hinge comprises a deletion of 1-10 amino acids. As shown in the Examples, an IgG1 antibody lacking amino acid residues SCDKTHT (S219, C220, D221, K222, T223, H224 and T225; SEQ ID NO: 151) conferred antibody mediated CD73 internalization more effectively than the same antibody having a wildtype IgG1 constant region. Similarly, in the context of an IgG2 antibody, an IgG2 antibody lacking amino acid residues CCVE (C219, C220, V222, and E224; SEQ ID NO: 152) conferred antibody mediated CD73 internalization more effectively than the same antibody having a wildtype IgG1 constant region. Accordingly, provided herein are modified heavy chain constant region in which the hinge comprises a deletion of 1, 2, 3, 4, 5, 6, or 7 amino acid residues, selected from residues S219, C220, D221, K222, T223, H224 and T225 for an IgG1 antibody, and residues C219, C220, V222, and E224 for an IgG2 antibody.

[0182] In certain embodiments, a modified heavy chain constant region comprises a CH1 domain that is a wildtype CH1 domain of the IgG1 or IgG2 isotype (“IgG1 CH1 domain” or “IgG2 CH1 domain,” respectively). CH1 domains of the isotypes IgG3 and IgG4 (“IgG3 CH1 domain and “IgG2 CH1 domain,” respectively) may also be used. A CH1 domain may also be a variant of a wildtype CH1 domain, e.g., a variant of a wildtype IgG1, IgG2, IgG3 or IgG4 CH1 domain. Exemplary variants of CH1 domains include A114C, C131S and/or T173C. A CH1 domain, e.g., an IgG2 CH1 domain, may comprise the substitution C131S, which substitution confers onto an IgG2 antibody or antibody having an IgG2 CH1 and hinge the B form (or conformation).

[0183] In certain embodiments, a modified heavy chain constant region comprises a CH1 domain that is of the IgG2 isotype. In certain embodiments, the CH1 domain is wildtype IgG2 CH1 domain, e.g., having the amino acid sequence: ASTKGPSVFPLAPCSRSTSESTAALGCLVKDYFPEPVTVSWNSGALTSGVHTFPAVL QSSGLYSLSSVVTVPSSNFGTQTYTCNVDHKPSNTKVDKTV (SEQ ID NO: 7). In certain embodiments, the CH1 domain is a variant of SEQ ID NO: 7 and comprises 1-10, 1-5, 1-2 or 1 amino acid substitutions or deletions relative to SEQ ID NO: 7. As further described in the Examples, it has been shown herein that an IgG2 CH1 domain or variants thereof confer enhanced properties to antibodies relative to IgG1 antibodies and even more enhanced properties when the antibodies also comprise an IgG2 hinge. In certain embodiments, IgG2 CH1 variants do not comprise an amino acid substitution or deletion at one or more of the following amino acid residues: C131, R133, E137 and S138, which amino acid residues are shown in bold and underlined in SEQ ID NO: 7 shown above. For example, a modified heavy chain constant region may comprise an IgG2 CH1 domain in which neither of R133, E137 and S138 are substituted with another amino acid or are deleted or in which neither of C131, R133, E137 and 5138 are substituted with another amino acid or are deleted. In certain embodiments, C131 is substituted with another amino acid, e.g., C131S, which substitution triggers the antibody to adopt conformation B. Both conformation A and conformation B antibodies having modified heavy chain constant regions have been shown herein to have enhanced activities relative to the same antibody with an IgG1 constant region.

[0184] In certain embodiments, N192 and/or F193 (shown as italicized and underlined residues in SEQ ID NO: 7 shown above) are substituted with another amino acid, e.g., with the corresponding amino acids in IgG1, i.e., N192S and/or F193L.

[0185] In certain embodiments, one or more amino acid residues of an IgG2 CH1 domain are substituted with the corresponding amino acid residues in IgG4. For example, N192 may be N192S; F193 may be F193L; C131 may be C131K; and/or T214 may be T214R.

[0186] An antibody may comprise a modified heavy chain constant region comprising an IgG2 CH1 domain or variant thereof and IgG2 hinge or variant thereof. The hinge and CH1 domain may be a combination of any IgG2 hinge and IgG2 CH1 domain described herein. In certain embodiments, the IgG2 CH1 and hinge comprise the following amino acid sequence ASTKGPSVFPLAPCSRSTSESTAALGCLVKDYFPEPVTVSWNSGALTSGVHTFPAVL QSSGLYSLSSVVTVPSSNFGTQTYTCNVDHKPSNTKVDKTVERKCCVECPPCPAPPV AG (SEQ ID NO: 133), or an amino acid sequence that differs therefrom in at most 1-10 amino acids. The amino acid variants are as described for the hinge and CH1 domains above.

[0187] In certain embodiments, antibodies comprise at least an IgG2 hinge, and optionally also an IgG2 CH1 domain or fragment or derivative of the hinge and/or CH1 domain and the antibody has adopted form (of conformation) A (see, e.g., Allen et al. (2009) Biochemistry 48:3755). In certain embodiments, antibodies comprise at least an IgG2 hinge, and optionally also an IgG2 CH1 domain or fragment or derivative of the hinge and/or CH1 domain and the antibody has adopted form B (see, e.g., Allen et al. (2009) Biochemistry 48:3755).

[0188] In certain embodiments, a modified heavy chain constant region comprises a CH2 domain that is a wildtype CH2 domain of the IgG1, IgG2, IgG3 or IgG4 isotype (“IgG1 CH2 domain,” “IgG2 CH2 domain,” “IgG3 CH2 domain,” or “IgG4 CH2 domain,” respectively. A CH2 domain may also be a variant of a wildtype CH2 domain, e.g., a variant of a wildtype IgG1, IgG2, IgG3 or IgG4 CH2 domain. Exemplary variants of CH2 domains include variants that modulate a biological activity of the Fc region of an antibody, such as ADCC or CDC or modulate the half-life of the antibody or its stability. In one embodiment, the CH2 domain is a human IgG1 CH2 domain with an A330S and/or P331S mutation, wherein the CH2 domain has reduced effector function relative to the same CH2 mutation without the mutations. A CH2 domain may have enhanced effector function. CH2 domains may comprise one or more of the following mutations: SE (S267E), SELF (S267E/L328F), SDIE (S239D/I332E), SEFF, GASDALIE (G236A/S239D/A330L/I332E), and/or one or more mutations at the following amino acids: E233, L235, G237, P238, H268, P271, L328, A330 and K322. Note that some of these mutations are actually part of the hinge, rather than the CH2 domain as defined herein. Other mutations are further set forth herein elsewhere.

[0189] In certain embodiments, a modified heavy chain constant region comprises a CH3 domain that is a wildtype CH3 domain of the IgG1, IgG2, IgG3 or IgG4 isotype (“IgG1 CH3 domain,” “IgG2 CH3 domain,” “IgG3 CH3 domain,” or “IgG4 CH3 domain,” respectively. A CH3 domain may also be a variant of a wildtype CH3 domain, e.g., a variant of a wildtype IgG1, IgG2, IgG3 or IgG4 CH3 domain. Exemplary variants of CH3 domains include variants that modulate a biological activity of the Fc region of an antibody, such as ADCC or CDC or modulate the half-life of the antibody or its stability.

[0190] Generally, variants of the CH1, hinge, CH2 or CH3 domains may comprise 1, 2, 3, 4, 5, 6, 7, 8, 9, 10 or more mutations, and/or at most 10, 9, 8, 7, 6, 5, 4, 3, 2 or 1 mutation, or 1-10 or 1-5 mutations, or comprise an amino acid sequence that is at least about 75%, 80%, 85%, 90%, 95%, 96%, 97%, 98%, or 99% identical to that of the corresponding wildtype domain (CH1, hinge, CH2, or CH3 domain, respectively), provided that the heavy chain constant region comprising the specific variant retains the necessary biological activity.

[0191] Table 5 sets forth exemplary human heavy chain constant regions comprising a human CH1, hinge, CH2 and/or CH3 domains, wherein each domain is either a wildtype domain or a variant thereof that provides the desired biological activity to the heavy chain constant region. An unfilled cell in Table 5 indicates that the domain is present or not, and if present can be of any isotype, e.g., IgG1, IgG2, IgG3 or IgG4. For example, an antibody comprising the heavy chain constant region 1 in Table 5 is an antibody that comprises a heavy chain constant region comprising at least an IgG2 hinge, and which may also comprise a CH1, CH2 and/or CH3 domain, and if present, which CH1, CH2 and/or CH3 domain is of an IgG1, IgG2, IgG3 or IgG4 isotype. As another example for understanding Table 5, an antibody comprising a heavy chain constant region 8 is an antibody comprising a heavy chain constant region comprising an IgG1 CH1 domain, and IgG2 hinge, an IgG1 CH2 domain, and which may or may not also comprise an CH3 domain, which is present, may be of an IgG1, IgG2, IgG3 or IgG4 isotype.

TABLE 5

| MHCCR* | CH1 | Hinge | CH2 | CH3 |
|---|---|---|---|---|
| 1 | | IgG2 | | |
| 2 | IgG1 | IgG2 | | |
| 3 | IgG2 | IgG2 | | |
| 4 | | IgG2 | IgG1 | |
| 5 | | IgG2 | IgG2 | |
| 6 | | IgG2 | | IgG1 |
| 7 | | IgG2 | | IgG2 |
| 8 | IgG1 | IgG2 | IgG1 | |
| 9 | IgG1 | IgG2 | IgG2 | |
| 10 | IgG2 | IgG2 | IgG1 | |
| 11 | IgG2 | IgG2 | IgG2 | |
| 12 | IgG1 | IgG2 | | IgG1 |
| 13 | IgG1 | IgG2 | | IgG2 |
| 14 | IgG2 | IgG2 | | IgG1 |
| 15 | IgG2 | IgG2 | | IgG2 |
| 16 | | IgG2 | IgG1 | IgG1 |
| 17 | | IgG2 | IgG1 | IgG2 |
| 18 | | IgG2 | IgG2 | IgG1 |
| 19 | | IgG2 | IgG2 | IgG2 |
| 20 | IgG1 | IgG2 | IgG1 | IgG1 |
| 21 | IgG1 | IgG2 | IgG1 | IgG2 |
| 22 | IgG1 | IgG2 | IgG2 | IgG1 |
| 23 | IgG1 | IgG2 | IgG2 | IgG2 |
| 24 | IgG2 | IgG2 | IgG1 | IgG1 |
| 25 | IgG2 | IgG2 | IgG1 | IgG2 |
| 26 | IgG2 | IgG2 | IgG2 | IgG1 |
| 27 | IgG2 | IgG2 | IgG2 | IgG2 |

*Modified heavy chain constant region

[0192] In certain embodiments, an antibody comprising a heavy chain constant region shown in Table 5 has an enhanced biological activity relative to the same antibody comprising a heavy chain constant region that does not comprise that specific heavy chain constant region or relative to the same antibody that comprises an IgG1 constant region.

[0193] In certain embodiments, a method for improving the biological activity of an antibody that comprises a non-IgG2 hinge and/or non-IgG2 CH1 domain comprises providing an antibody that comprises a non-IgG2 hinge and/or a non-IgG2 CH1 domain, and replacing the non-IgG2 hinge and the non-IgG2 CH1 domain with an IgG2 hinge and an IgG2 CH1 domain, respectively. A method for improving the biological activity of an antibody that does not comprise a modified heavy chain constant region, may comprise providing an antibody that does not comprise a modified heavy chain constant region, and replacing its heavy chain constant region with a modified heavy chain constant region.

[0194] Exemplary modified heavy chain constant regions are provided in Table 6, which sets forth the identity of each of the domains.

TABLE 6

| | | | | | SEQ ID |
|---|---|---|---|---|---|
| Modified heavy | | | | | NO of |
| chain constant | | | | | whole |
| region | CH1 | Hinge | CH2 | CH3 | MHCCR |
| IgG1-IgG2-IgG1 | IgG1 | IgG2/IgG1 | IgG1 | IgG1 | SEQ ID NO: 26 |
| | wildtype | SEQ ID NO: 22 | wildtype | wildtype | |
| | SEQ ID NO: 2 | | SEQ ID NO: 4 | SEQ ID NO: 5 | |
| IgG1-IgG2-IgG12 | IgG1 | IgG2 | IgG1 | IgG1 | SEQ ID NO: 27 |
| | wildtype | wildtype | wildtype | wildtype | |
| | SEQ ID NO: 2 | SEQ ID NO: 8 | SEQ ID NO: 4 | SEQ ID NO: 5 | |
| IgG1-IgG2CS- | IgG1 | IgG2C219S/IgG1 | IgG1 | IgG1 | SEQ ID NO: 32 |
| IgG1 | wildtype | SEQ ID NO: 23 | wildtype | wildtype | |
| | SEQ ID NO: 2 | | SEQ ID NO: 4 | SEQ ID NO: 5 | |
| IgG1-IgG2CS- | IgG1 | IgG2 C219S | IgG1 | IgG1 | SEQ ID NO: 33 |
| IgG12 | wildtype | SEQ ID NO: 21 | wildtype | wildtype | |
| | SEQ ID NO: 2 | | SEQ ID NO: 4 | SEQ ID NO: 5 | |
| IgG2-IgG1 | IgG2 | IgG2/IgG1 | IgG1 | IgG1 | SEQ ID NO: 28 |
| | wildtype | SEQ ID NO: 22 | wildtype | wildtype | |
| | SEQ ID NO: 7 | | SEQ ID NO: 4 | SEQ ID NO: 5 | |
| IgG2-IgG12 | IgG2 | IgG2 | IgG1 | IgG1 | SEQ ID NO: 29 |
| | wildtype | wildtype | wildtype | wildtype | |
| | SEQ ID NO: 7 | SEQ ID NO: 8 | SEQ ID NO: 4 | SEQ ID NO: 5 | |
| IgG2CS-IgG1 | IgG2 | IgG2C219S/IgG1 | IgG1 | IgG1 | SEQ ID NO: 34 |
| | wildtype | SEQ ID NO: 23 | wildtype | wildtype | |
| | SEQ ID NO: 7 | | SEQ ID NO: 4 | SEQ ID NO: 5 | |
| IgG2CS-IgG12 | IgG2 | IgG2 C219S | IgG1 | IgG1 | SEQ ID NO: 35 |
| | wildtype | SEQ ID NO: 21 | wildtype | wildtype | |
| | SEQ ID NO: 7 | | SEQ ID NO: 4 | SEQ ID NO: 5 | |
| IgG1CH1- | IgG1 | IgG2 | IgG1 | IgG1 | SEQ ID NO: 30 |
| IgG2Hinge- | wildtype | wildtype | A330S/P331S | wildtype | |
| IgG1CH2 | SEQ ID NO: 2 | SEQ ID NO: 8 | SEQ ID NO: 24 | SEQ ID NO: 5 | |
| (A330S, P331S)- | | | | | |
| IgG1CH3 or | | | | | |
| IgG1-IgG2- | | | | | |
| IgG1.1 | | | | | |
| IgG1CH1- | IgG1 | IgG2 C219S | IgG1 | IgG1 | SEQ ID NO: 36 |
| IgG2Hinge | wildtype | SEQ ID NO: 21 | A330S/P331S | wildtype | |
| (C219S)- | SEQ ID NO: 2 | | SEQ ID NO: 24 | SEQ ID NO: 5 | |
| IgG1CH2 | | | | | |
| (A330S, P331S)- | | | | | |
| IgG1CH3 or | | | | | |
| IgG1-IgG2CS- | | | | | |
| IgG1.1 | | | | | |
| IgG2-IgG1.1 | IgG2 | IgG2 | IgG1 | IgG1 | SEQ ID NO: 31 |
| | wildtype | wildtype | A330S/P331S | wildtype | |
| | SEQ ID NO: 7 | SEQ ID NO: 8 | SEQ ID NO: 24 | SEQ ID NO: 5 | |
| IgG2CS-IgG1.1 | IgG2 | IgG2 C219S | IgG1 | IgG1 | SEQ ID NO: 37 |
| | wildtype | SEQ ID NO: 21 | A330S/P331S | wildtype | |
| | SEQ ID NO: 7 | | SEQ ID NO: 24 | SEQ ID NO: 5 | |

[0195] In certain embodiments, an antibody comprises a modified heavy chain constant region comprising an IgG2 hinge comprising any one of SEQ ID NO: 8, 21, 22, 23, 126-132, 134-136 and 137 or a variant thereof, such as an IgG2 hinge comprising an amino acid sequence that (i) differs from any one of SEQ ID NO: 8, 21, 22, 23, 126-132, 134-136 and 137 in 1, 2, 3, 4 or 5 amino acids substitutions, additions or deletions; (ii) differs from any one of SEQ ID NO: 8, 21, 22, 23, 126-132, 134-136 and 137 in at most 5, 4, 3, 2, or 1 amino acids substitutions, additions or deletions; (iii) differs from any one of SEQ ID NO: 8, 21, 22, 23, 126-132, 134-136 and 137 in 1-5, 1-3, 1-2, 2-5 or 3-5 amino acids substitutions, additions or deletions and/or (iv) comprises an amino acid sequence that is at least about 75%, 80%, 85%, 90%, 95%, 96%, 97%, 98% or 99% identical to any one of SEQ ID NO: 8, 21, 22, 23, 126-132, 134-136 or 137, wherein in any of (i)-(iv), an amino acid substitution may be a conservative amino acid substitution or a non-conservative amino acid substitution; and wherein the modified heavy chain constant region has an enhanced biological activity relative to that of another heavy chain constant region, e.g., a heavy chain constant region that comprises a non-IgG2 hinge or relative to the same modified heavy chain constant region that comprises a non-IgG2 hinge.

[0196] In certain embodiments, a hinge comprises a sequence that is a variant of any one of SEQ ID NO: 8, 21, 22, 23, 126-132, 134-136 and 137, wherein R217 (second amino acid in wildtype IgG2 hinge (SEQ ID NO: 8) is not deleted or substituted with another amino acid. In certain embodiments in which a hinge is a variant of any one of SEQ ID NO: 8, 21, 22, 23, 126-132, 134-136 and 137, the hinge has a stiffness that is similar to that of wildtype IgG2.

[0197] In certain embodiments, an antibody comprises a modified heavy chain constant region comprising an IgG1 CH1 domain comprising SEQ ID NO: 2 or an IgG2 CH1 domain comprising SEQ ID NO: 7, or a variant of SEQ ID NO: 2 or 7, which variant (i) differs from SEQ ID NO: 2 or 7 in 1, 2, 3, 4 or 5 amino acids substitutions, additions or deletions; (ii) differs from SEQ ID NO: 2 or 7 in at most 5, 4, 3, 2, or 1 amino acids substitutions, additions or deletions; (iii) differs from SEQ ID NO: 2 or 7 in 1-5, 1-3, 1-2, 2-5 or 3-5 amino acids substitutions, additions or deletions and/or (iv) comprises an amino acid sequence that is at least about 75%, 80%, 85%, 90%, 95%, 96%, 97%, 98% or 99% identical to SEQ ID NO: 2 or 7, wherein in any of (i)-(iv), an amino acid substitution may be a conservative amino acid substitution or a non-conservative amino acid substitution; and wherein the modified heavy chain constant region has an enhanced biological activity relative to that of another heavy chain constant region, e.g., a heavy chain constant region that comprises a non-IgG2 hinge or relative to the same modified heavy chain constant region that comprises a non-IgG2 hinge.

[0198] In certain embodiments, an antibody comprises a modified heavy chain constant region comprising an IgG1 CH2 domain comprising SEQ ID NO: 4 or 24, or a variant of SEQ ID NO: 4 or 24, which variant (i) differs from SEQ ID NO: 4 or 24 in 1, 2, 3, 4 or 5 amino acids substitutions, additions or deletions; (ii) differs from SEQ ID NO: 4 or 24 in at most 5, 4, 3, 2, or 1 amino acids substitutions, additions or deletions; (iii) differs from SEQ ID NO: 4 or 24 in 1-5, 1-3, 1-2, 2-5 or 3-5 amino acids substitutions, additions or deletions and/or (iv) comprises an amino acid sequence that is at least about 75%, 80%, 85%, 90%, 95%, 96%, 97%, 98% or 99% identical to SEQ ID NO: 4 or 24, wherein in any of (i)-(iv), an amino acid substitution may be a conservative amino acid substitution or a non-conservative amino acid substitution; and wherein the modified heavy chain constant region has an enhanced biological activity relative to that of another heavy chain constant region, e.g., a heavy chain constant region that comprises a non-IgG2 hinge or relative to the same modified heavy chain constant region that comprises a non-IgG2 hinge.

[0199] In certain embodiments, an antibody comprises a modified heavy chain constant region comprising an IgG1 CH3 domain comprising SEQ ID NO: 5, or a variant of SEQ ID NO: 5, which variant (i) differs from SEQ ID NO: 5 in 1, 2, 3, 4 or 5 amino acids substitutions, additions or deletions; (ii) differs from SEQ ID NO: 5 in at most 5, 4, 3, 2, or 1 amino acids substitutions, additions or deletions; (iii) differs from SEQ ID NO: 5 in 1-5, 1-3, 1-2, 2-5 or 3-5 amino acids substitutions, additions or deletions and/or (iv) comprises an amino acid sequence that is at least about 75%, 80%, 85%, 90%, 95%, 96%, 97%, 98% or 99% identical to SEQ ID NO: 5, wherein in any of (i)-(iv), an amino acid substitution may be a conservative amino acid substitution or a non-conservative amino acid substitution; and wherein the modified heavy chain constant region has an enhanced biological activity relative to that of another heavy chain constant region, e.g., a heavy chain constant region that comprises a non-IgG2 hinge or relative to the same modified heavy chain constant region that comprises a non-IgG2 hinge.

[0200] Modified heavy chain constant regions may also comprise a combination of the CH1, hinge, CH2 and CH3 domains described above.

[0201] In certain embodiments, an antibody comprises a modified heavy chain constant region described herein or a variant of a modified heavy chain constant region described herein, which variant (i) differs from a modified heavy chain constant region described herein in 1, 2, 3, 4, 5, 6, 7, 8, 9, 10 or more amino acids substitutions, additions or deletions; (ii) differs from a modified heavy chain constant region described herein in at most 10, 9, 8, 7, 6, 5, 4, 3, 2, or 1 amino acids substitutions, additions or deletions; (iii) differs from a modified heavy chain constant region described herein in 1-5, 1-3, 1-2, 2-5, 3-5, 1-10, or 5-10 amino acids substitutions, additions or deletions and/or (iv) comprises an amino acid sequence that is at least about 75%, 80%, 85%, 90%, 95%, 96%, 97%, 98% or 99% identical to a modified heavy chain constant region described herein, wherein in any of (i)-(iv), an amino acid substitution may be a conservative amino acid substitution or a non-conservative amino acid substitution; and wherein the modified heavy chain constant region has an enhanced biological activity relative to that of another heavy chain constant region, e.g., a heavy chain constant region that comprises a non-IgG2 hinge or relative to the same modified heavy chain constant region that comprises a non-IgG2 hinge.

[0202] In certain embodiments, an antibody comprises a modified heavy chain constant region comprising any one of SEQ ID NO: 26-37, 54-56, 78-125 and 152-232, or a variant of any one of SEQ ID NO: 26-37, 54-56, 78-125 and 152-232, which variant (i) differs from any one of SEQ ID NO: 26-37, 54-56, 78-125 and 152-232 in 1, 2, 3, 4, 5, 6, 7, 8, 9, 10 or more amino acids substitutions, additions or deletions; (ii) differs from any one of SEQ ID NO: 26-37, 54-56, 78-125 and 152-232 in at most 10, 9, 8, 7, 6, 5, 4, 3, 2, or 1 amino acids substitutions, additions or deletions; (iii) differs from any one of SEQ ID NO: 26-37, 54-56, 78-125 and 152-232 in 1-5, 1-3, 1-2, 2-5, 3-5, 1-10, or 5-10 amino acids substitutions, additions or deletions and/or (iv) comprises an amino acid sequence that is at least about 75%, 80%, 85%, 90%, 95%, 96%, 97%, 98% or 99% identical to any one of SEQ ID NO: 26-37, 54-56, 78-125 and 152-232, wherein in any of (i)-(iv), an amino acid substitution may be a conservative amino acid substitution or a non-conservative amino acid substitution; and wherein the modified heavy chain constant region has an enhanced biological activity (and/or reduced effector function) relative to that of another heavy chain constant region, e.g., a heavy chain constant region that comprises a non-IgG2 hinge or relative to the same modified heavy chain constant region that comprises a non-IgG2 hinge or relative to the same heavy chain but lacking the modification.

[0203] Modified heavy chain constant regions may have (i) similar, reduced or increased effector function (e.g., binding to an FcγR) relative to the same heavy chain constant region but without the modification, e.g., relative to a wildtype heavy chain constant region and/or (ii) similar, reduced or increased half-life (or binding to the FcRn receptor) relative to a wildtype heavy chain constant region.

### II. Modified Heavy Chain Constant Regions Having Reduced Effector Function

[0204] Also provided herein are antibodies and fusion proteins comprising heavy chains comprising one or more amino acid mutation that reduces FcgR binding and/or effector function.

[0205] In certain embodiments, an antibody (or antigen binding fragment thereof) or fusion protein comprises a modified heavy chain constant region comprising SEQ ID NO: 198 or a portion thereof comprising P238K, or a variant of any one of SEQ ID NO: 198 or portion thereof, which variant (i) differs from SEQ ID NO: 198 or a portion thereof comprising P238K in 1, 2, 3, 4, 5, 6, 7, 8, 9, 10 or more amino acids substitutions, additions or deletions; (ii) differs from SEQ ID NO: 198 or a portion thereof comprising P238K in at most 10, 9, 8, 7, 6, 5, 4, 3, 2, or 1 amino acids substitutions, additions or deletions; (iii) differs from SEQ ID NO: 198 or a portion thereof comprising P238K in 1-5, 1-3, 1-2, 2-5, 3-5, 1-10, or 5-10 amino acids substitutions, additions or deletions and/or (iv) comprises an amino acid sequence that is at least about 75%, 80%, 85%, 90%, 95%, 96%, 97%, 98% or 99% identical to SEQ ID NO: 198 or a portion thereof comprising P238K, wherein an amino acid substitution may be a conservative amino acid substitution or a non-conservative amino acid substitution; and wherein the modified heavy chain constant region has reduced effector function, e.g., undetectable binding to the low affinity FcgRs (e.g., CD32a, CD32b and CD16a) and optionally undetectable binding to the high affinity FcgR (CD64), such as determined in an assay described herein.

[0206] In certain embodiments, an IgG, e.g., IgG1 or IgG2, heavy chain constant domain comprising a P238K mutation (e.g., comprising SEQ ID NO: 198 or a portion thereof), comprises no other mutations relative to a wild type IgG1 Fc, e.g., those described herein. In certain embodiments, an IgG1 Fc comprising a P238K mutation (e.g., comprising SEQ ID NO: 198 or a portion thereof), comprises 1-5 amino acid changes in addition to P238K relative to the wild type human IgG1 Fc, e.g., it comprises SEQ ID NO: 198 or a portion thereof and 1-5 amino acid changes relative to SEQ ID NO: 198 or the portion thereof, provided that the IgG1 Fc has reduced effector function.

[0207] In certain embodiments, an IgG, e.g., IgG1 or IgG2, heavy chain constant domain comprising a P238K mutation does not comprise any other mutation that reduces effector function. In certain embodiments, an IgG, e.g., IgG1 or IgG2, comprising a P238K mutation comprises 1-5 mutations that reduces effector function.

[0208] In certain embodiments, an IgG, e.g., IgG1 or IgG2, constant domain comprising a P238K mutation also comprises an L235E mutation and/or a K322A mutation, and may, in certain embodiments not contain any additional heavy chain constant domain mutation that modulates Fc effector function, e.g., it does not include a mutation at P330, P331, or a mutation in the lower hinge, e.g., at amino acids 234 and 236-237. The IgG may be an IgG1 or IgG2 or a chimeric or hybrid Ig thereof.

[0209] In certain embodiments, an antibody comprises a heavy chain constant region comprising an IgG2 or IgG1 constant domain, or at least the hinge thereof, wherein the IgG2 or IgG1 constant domain or portion thereof comprises a mutation selected from the group consisting of P238A, P238K, L235A, L235E, K322A, and optionally a mutation at C219 and/or C220, e.g., C219S and/or C220S.

[0210] In certain embodiments, an antibody comprises a heavy chain constant region comprising an IgG1 constant domain comprising one or more of L234A, L235E and G237A. As used herein “IgG1.3” refers to an IgG1 heavy chain comprising L234A, L235E and G237A (see, e.g., SEQ ID NO: 248). IgG1 constant regions comprising these three mutations may also comprise additional mutations, such as those described herein. Exemplary sequences comprising L234A, L235E and G237A mutations and additional mutations are provided herein in the Sequence Table. An IgG1.3 Fc provides an antibody with significantly reduced effector function, such as ADCC and CDC. In certain embodiments, an Fc comprises the mutations of IgG1.3 and additional mutations, e.g., P238K.

[0211] In certain embodiments, an antibody comprises an IgG1.3 heavy chain constant region, which constant region does not comprise any other than mutation that modulates effector function, in addition to L234A, L235E and G237A. In certain embodiments, an antibody comprises an IgG1.3 heavy chain constant region, which constant region does not comprise any other than mutation, in addition to L234A, L235E and G237A.

[0212] In certain embodiments, a modified heavy chain constant region is an IgG1 or IgG2 or IgG1/IgG2 hybrid thereof comprising a substitution at one or more of amino acid residues L234, L235, P238, G237 and K322, such that (i) binding to the low affinity FcgRs is reduced or undetectable or insignificant; (ii) binding to the high affinity FcgR is reduced or undetectable or insignificant; (iii) binding to C1Q is reduced or undetectable or insignificant; (iv) ADCC is reduced or undetectable or insignificant; (v) ADCP is reduced or undetectable or insignificant; and/or (vi) CDC is reduced or undetectable or insignificant. As described in the Examples, a P238K mutation in an IgG1 heavy chain constant region in the absence of any additional mutations reducing effector function reduces binding to all low affinity FcgRs, and reduces binding to high affinity FcgR (CD64) about 100 fold relative to wildtype IgG1. In addition, no binding is detected upon cross-linking of the heavy chain constant region. Adding the mutation L235E to P238K in an IgG1 heavy chain constant region reduced CD64 binding another 1000 fold. Additional mutations L234A and G237A to an IgG1 heavy chain constant region comprising P238K and L235E further reduced CD64 binding. The mutation K322A has no impact on FcgR binding, but reduced C1q binding, and therefore CDC. An IgG2 heavy chain constant region with a P238K mutation has reduced binding to all FcgRs.

[0213] Accordingly, provided herein are modified heavy chain constant regions comprising (i) a substitution at P238, e.g., P238K, P238R or P238H; (ii) a substitution at L234, e.g., L234A, L234V, L234L, L234I, L234P, L234F or L234M; (iii) a substitution at L235, e.g., L235E, L235D or L235A; (iv) a deletion of or substitution at G237, e.g., G237A, G237V, G237L, G237I, G237P, G237F or G237M; and/or (v) a substitution at K322, e.g., K322A, K322V, K322L, K322I, K322P, K322F or K322M. Modified heavy chain constant regions may comprise one or more of P238K, L234A, L235E, G237A and K322A. For example, a heavy chain constant region may comprise (i) P238K and optionally no other amino acid mutation that reduces effector function; (ii) P238K and L235E and optionally no other amino acid mutation that reduces effector function; (iii) P238K, L235E and K322A and optionally no other amino acid mutation that reduces effector function; (iv) P238K and L234A and optionally no other amino acid mutation that reduces effector function; (v) P238K and G237A and optionally no other amino acid mutation that reduces effector function; (vi) P238K, L234A and G237A and optionally no other amino acid mutation that reduces effector function; (vii) P238K, L235E and L234A and optionally no other amino acid mutation that reduces effector function; (viii) P238K, L235E and G237A and optionally no other amino acid mutation that reduces effector function; (ix) P238K, L235E, L234A and G237A and optionally no other amino acid mutation that reduces effector function; (x) P238K, K322A and L234A and optionally no other amino acid mutation that reduces effector function; (xi) P238K, K322A and G237A and optionally no other amino acid mutation that reduces effector function; (xii) P238K, K322A, L234A and G237A and optionally no other amino acid mutation that reduces effector function; (xiii) P238K, L2325E, K322A and L234A and optionally no other amino acid mutation that reduces effector function; (xiv) P238K, L235E, K322A and G237A and optionally no other amino acid mutation that reduces effector function; and/or (xv) P238K, L235E, K322A, L234A and G237A and optionally no other amino acid mutation that reduces effector function.

[0214] Considering that each of P238K, L235E, K322A, L234A and G237A can be substituted with an amino acid having similar characteristics, heavy chain constant domains may comprise: (i) a substitution at P238 and optionally no other amino acid mutation that reduces effector function; (ii) a substitution at P238 and L235 and optionally no other amino acid mutation that reduces effector function; (iii) a substitution at P238, L235 and K322 and optionally no other amino acid mutation that reduces effector function; (iv) a substitution at P238 and L234 and optionally no other amino acid mutation that reduces effector function; (v) a substitution at P238 and G237 and optionally no other amino acid mutation that reduces effector function; (vi) a substitution at P238, L234 and G237 and optionally no other amino acid mutation that reduces effector function; (vii) a substitution at P238, L235 and L234 and optionally no other amino acid mutation that reduces effector function; (viii) a substitution at P238, L235 and G237 and optionally no other amino acid mutation that reduces effector function; (ix) a substitution at P238, L235, L234 and G237 and optionally no other amino acid mutation that reduces effector function; (x) a substitution at P238, K322 and L234 and optionally no other amino acid mutation that reduces effector function; (xi) a substitution at P238, K322 and G237 and optionally no other amino acid mutation that reduces effector function; (xii) a substitution at P238, K322, L234 and G237 and optionally no other amino acid mutation that reduces effector function; (xiii) a substitution at P238, L2325, K322 and L234 and optionally no other amino acid mutation that reduces effector function; (xiv) a substitution at P238, L235, K322 and G237 and optionally no other amino acid mutation that reduces effector function; (xv) a substitution at P238, L235, K322, L234 and G237 and optionally no other amino acid mutation that reduces effector function; wherein a substitution at P238 may be P238K, P238R or P238H; a substitution at L234 may be L234A, L234V, L234L, L234I, L234P, L234F or L234M; a substitution at L235 may be L235E, L235D or L235A; a substitution at G237 may be G237A, G237V, G237L, G237I, G237P, G237F or G237M; and a substitution at K322 may be K322A, K322V, K322L, K322I, K322P, K322F or K322M.

[0215] The heavy chain constant regions comprising one or more of P238K, L235E, K322A, L234A and G237A is that of an IgG heavy chain constant domain, such as from IgG1, IgG2 or a hybrid thereof, such as provided in the Examples.

[0216] Below is a table that provides SEQ ID NOs of sequences (provided in the Sequence Table) of preferred modified heavy chain constant regions comprising one or more of P238K, L235E, K322A, L234A and G237A, wherein “1.3” indicates the presence of L234A, L235E and G237A.

| | First: | | | | | |
|---|---|---|---|---|---|---|
| | | | IgG2.3 | | IgG2.5 | |
| Second: | IgG1fa | IgG1f | IgG2 C219S | IgG2.3G1f | IgG2 C131S) | IgG2.5G1f |
| — | 233 | 246 | 240 | 242 | 255 | 257 |
| 1.3 | 234 | 248 | | 252 | | 259 |
| P238K | 235 (198) | 247 | 241 | 243 | 256 | 245 = 258 |
| 1.3 P238K | 236 | 249 | | 253 | | 260 |
| P238K L235E | 237 | 250 | | 244 | | 261 |
| P238K L235A | 238 | | | | | |
| P238K L235E | 239 | 251 | | 254 | | 262 |
| K322A | | | | | | |

[0217] In certain embodiments, a modified heavy chain constant region comprises a sequence selected from the sequences of heavy chain constant regions comprising one or more of P238K, L235E, K322A, L234A and G237A in the table above, e.g., any one of SEQ ID NOs: 198, 234-239, 241, 243, 244, 245, 247-254, 256 and 258-262, or a variant thereof, which variant (i) differs from any one of SEQ ID NO: 198, 234-239, 241, 243, 244, 245, 247-254, 256 and 258-262 in 1, 2, 3, 4, 5, 6, 7, 8, 9, 10 or more amino acids substitutions, additions or deletions; (ii) differs from any one of SEQ ID NO: 198, 234-239, 241, 243, 244, 245, 247-254, 256 and 258-262 in at most 10, 9, 8, 7, 6, 5, 4, 3, 2, or 1 amino acids substitutions, additions or deletions; (iii) differs from any one of SEQ ID NO: 198, 234-239, 241, 243, 244, 245, 247-254, 256 and 258-262 in 1-5, 1-3, 1-2, 2-5, 3-5, 1-10, or 5-10 amino acids substitutions, additions or deletions and/or (iv) comprises an amino acid sequence that is at least about 75%, 80%, 85%, 90%, 95%, 96%, 97%, 98% or 99% identical to any one of SEQ ID NO: 198, 234-239, 241, 243, 244, 245, 247-254, 256 and 258-262, wherein in any of (i)-(iv), an amino acid substitution may be a conservative amino acid substitution or a non-conservative amino acid substitution; and wherein the modified heavy chain constant region has reduced FcgR binding and/or effector function relative to the same heavy chain constant region but lacking the mutations.

[0218] Antibodies or fusion proteins comprising a modified heavy chain constant region described in this section are preferably stable, e.g., have a Tm1 of at least 60, 62, 65, 67° C. or higher, as measured, e.g., as described in the Examples. In certain embodiments, antibodies or fusion proteins comprising a modified heavy chain constant region described in this section have reduced binding to low affinity FcgRs, high affinity FcgR, C1q and/or reduced ADCC, ADCP or CDC relative to the corresponding heavy chain constant region without the one or more mutations. In certain embodiments, antibodies or fusion proteins comprising a modified heavy chain constant region described in this section have reduced binding to low affinity FcgRs, high affinity FcgR, C1q and/or reduced ADCC, ADCP or CDC relative to the corresponding heavy chain constant region without the one or more mutations even in the presence of cross-linking.

[0219] A modified heavy chain constant region may comprise P238K and a substitution at L234, such as L234A, L234V, L234L, L234I, L234P, L234F or L234M. A modified heavy chain constant region may comprise P238K and a substitution at L235, e.g., L235E, L235D or L235A. A modified heavy chain constant region may comprise P238K and a substitution at K322, e.g., K322A, K322V, K322L, K322I, K322P, K322F or K322M. A modified heavy chain constant region may comprise P238K and a substitution at G237, e.g., G237A, G237V, G237L, G237I, G237P, G237F or G237M. A modified heavy chain constant region may comprise P238K, L235E and a substitution at K322, e.g., K322A, K322V, K322L, K322I, K322P, K322F or K322M.

[0220] Heavy chain constant regions are provided in the Sequence Table. In certain embodiments, an antibody comprises one of the heavy chain constant regions set forth in the Table, wherein the constant region does not comprise any mutation in addition to that in the sequence set forth in the Table. In certain embodiments, an antibody comprises one of the heavy chain constant regions set forth in the Table, wherein the constant region (i) differs from a sequence in the Sequence Table in 1, 2, 3, 4 or 5 amino acids substitutions, additions or deletions; (ii) differs from a sequence in the Sequence Table in at most 5, 4, 3, 2, or 1 amino acids substitutions, additions or deletions; (iii) differs from a sequence in the Sequence Table in 1-5, 1-3, 1-2, 2-5 or 3-5 amino acids substitutions, additions or deletions and/or (iv) comprises an amino acid sequence that is at least about 75%, 80%, 85%, 90%, 95%, 96%, 97%, 98% or 99% identical to a sequence in the Sequence Table, wherein in any of (i)-(iv), an amino acid substitution may be a conservative amino acid substitution or a non-conservative amino acid substitution; and wherein the biological activity of the constant region is not significantly changed by these mutation(s).

[0221] Heavy chain constant regions may comprise a combination of mutations that confer onto an antibody comprising the heavy chain region a combination of the biological activities conferred by each individual mutation. For example, one or more mutation that enhances agonist activity formation of large cell surface complexes or that enhance internalization of the antibody can be combined with one or more mutation that modulate effector function. Exemplary constant chain sequences comprising a combination of mutations conferring different biological functions are set forth in the Sequence Table.

III. Antibodies with Modified Heavy Chain Constant Regions that Enhance Internalization and Agonist Activity and Target Antigens Thereof

[0222] Modified heavy chain constant regions can be used in a wide range of antibodies and fusion proteins, such as antibodies that require internalization (e.g., antibody drug conjugates (ADCs), and anti-CD73 antibodies), agonist activity (e.g., antibodies that are effective in modulating immune responses, e.g., in stimulating T cell activation, such as agonist anti-GITR antibodies), antagonist activity (e.g., antibodies that inhibit or block a protein that inhibits an immune response, e.g., T cell activation, such as an antagonist PD-1 antibody), effector function, e.g., ADCC and CDC, or reduced effector function, signal transduction, or anti-tumor activity. For example, internalization of a cell surface inhibitory receptor may limit its ability to interact with its receptor(s) and decrease cell function(s).

[0223] In one embodiment, antibodies comprising a modified heavy chain constant domain are antibodies that require their internalization for activity (e.g., antibodies that are specific for cell surface receptors) by, e.g., inducing receptor-mediated endocytosis when they bind to the cell surface. Such antibodies may be used as vehicles for targeted delivery of drugs, toxins, enzymes or DNA for therapeutic applications Therefore, increasing the internalization properties of these antibodies is desirable. Exemplary antibodies that may benefit from effective internalization are antibody drug conjugates. Various assays for measuring the internalization properties of an antibody are known in the art and described herein. These assays utilize, for example, a wide range of dyes for antibody labeling that can be used in wash or quench-based assays to monitor internalization. Antibody internalization can also be monitored in no-wash assays which rely on fluorescent labels.

[0224] In one embodiment, antibodies comprising a modified heavy chain constant domain are antibodies that require the internalization of the antigen to which they bind, e.g., a cell surface molecule, such as a receptor or a ligand, for activity. Thus, antibodies to cell surface proteins that require to be downregulated for biological (e.g., therapeutic) activity can use a modified heavy chain constant region described herein.

[0225] In certain embodiments, antibodies comprising a modified heavy chain constant domain bind to cell surface molecules and agonize or antagonize the biological activity of the cell surface molecule, e.g., a cell surface molecule on an immune cell, e.g., a T cell, Teff cell, Th1 cell, Th2 cell, CD4+ T cell, CD8+ T cell, Treg cell, dendritic cell, macrophage, monocyte, Langerhans cell, NK cell, myeloid derived suppressor cell, B cell or any other immune cell. The cell surface molecule may be a stimulatory, e.g., co-stimulatory molecule (e.g., GITR, OX40, CD137, CD40, ICOS and other TNFR family members), and the antibody may further stimulate the activity (an agonist antibody) or the antibody may inhibit the activity (an antagonist antibody). The cell surface molecule may be an inhibitory molecule (e.g., CTLA-4, PD-1, PD-L1, LAG-3, TIM-3), and the antibody may further stimulate the activity (an agonist antibody) or the antibody may inhibit the activity (an antagonist antibody).

[0226] In certain embodiments, antibodies comprising a modified heavy chain constant domain are agonist antibodies of stimulatory (or co-stimulatory) molecules that, e.g., boost the immune system of a subject, e.g., by inducing IL-2 and/or IFN-γ secretion from T cells (e.g., anti-GITR antibodies). Other agonist antibodies have been shown to activate APCs, promote antitumor T-cell responses, and/or foster cytotoxic myeloid cells with the potential to control cancer in the absence of T-cell immunity. Agonist antibodies of stimulatory molecules are different from antagonist antibodies of inhibitory molecules, which block negative immune checkpoint such as anti-CTLA-4 or anti-PD-1. Agonist activity, such as T cell proliferation, can be measured using a variety of methods known in the art.

[0227] In certain embodiments, antibodies comprising a modified heavy chain constant domain are antagonist antibodies of checkpoint inhibitors boost the immune response of a subject by blocking or inhibiting negative immune checkpoint, such as anti-CTLA-4 or anti-PD-1 antibodies, e.g., by targeting the inhibitory receptor expressed on activated T-cells. Antagonist activity, such as inhibition of T cell proliferation can be measured using a variety of methods known in the art.

[0228] In one embodiment, the antibody is (i) an agonist of a co-stimulatory receptor or (ii) an antagonist of an inhibitory signal on, e.g., T cells, both of which may result in amplifying immune responses, e.g., antigen-specific T cell responses, (immune checkpoint regulators). In certain embodiments, an antibody is (i) an antagonist of a co-stimulatory receptor or (ii) an agonist of an inhibitory signal, e.g., on T cells. Co-stimulatory and co-inhibitory molecules may be members of the immunoglobulin super family (IgSF), and antibodies having modified heavy chain constant regions may bind to any of them. One important family of membrane-bound ligands that bind to co-stimulatory or co-inhibitory receptors is the B7 family, which includes B7-1, B7-2, B7-H1 (PD-L1), B7-DC (PD-L2), B7-H2 (ICOS-L), B7-H3, B7-H4, B7-H5 (VISTA), and B7-H6, and antibodies having modified heavy chain constant regions may bind to any of them. Another family of membrane bound ligands that bind to co-stimulatory or co-inhibitory receptors is the TNF family of molecules that bind to cognate TNF receptor (TNFR) family members, which include CD40 and CD40L, OX-40, OX-40L, CD70, CD27L, CD30, CD30L, 4-1BBL, CD137, TRAIL/Apo2-L, TRAILR1/DR4, TRAILR2/DR5, TRAILR3, TRAILR4, OPG, RANK, RANKL, TWEAKR/Fn14, TWEAK, BAFFR, EDAR, XEDAR, TACI, APRIL, BCMA, LTβR, LIGHT, DcR3, HVEM, VEGI/TL1A, TRAMP/DR3, EDAR, EDA1, XEDAR, EDA2, TNFR1, Lymphotoxin α/TNFβ, TNFR2, TNFα, LTα, LTβ, LTβR, Lymphotoxin α 1β2, FAS, FASL (CD178), DR3 (TNFRSF25), RELT, DR6, TROY, NGFR (see, e.g., Tansey (2009) Drug Discovery Today 00:1). Thus, the antibodies described herein can bind to any of these surface molecules, and they can be, e.g., (i) agonists or antagonists (or inhibitors or blocking agents) of proteins of the IgSF family or B7 family or the TNFR family that inhibit T cell activation or antagonists of cytokines that inhibit T cell activation (e.g., IL-6, IL-10, TGF-β, VEGF; “immunosuppressive cytokines”) and/or (ii) agonists or antagonists of stimulatory receptors of the IgSF family, B7 family or the TNF family or of cytokines that stimulate T cell activation, for modulating, e.g., stimulating, an immune response, e.g., for treating proliferative diseases, such as cancer.

[0229] Accordingly, an antibody with a modified heavy chain constant domain may be used as one of the following agents:
[0230] (1) An agonist of a protein that stimulates, e.g., T cell activation, such as B7-1, B7-2, CD28, 4-1BB (CD137), 4-1BBL, GITR, ICOS, ICOS-L, OX40, OX40L, CD70, CD27, CD40, DR3 or CD28H; or
[0231] (2) An antagonist (inhibitor or blocking agent) of a protein that inhibits T cell activation (e.g., immune checkpoint inhibitors), such as CTLA-4, PD-1, PD-L1, PD-L2, and LAG-3, as described above, and any of the following proteins: TIM-3, Galectin 9, CEACAM-1, BTLA, CD69, Galectin-1, TIGIT, CD113, GPR56, VISTA, 2B4, CD48, GARP, CD73, PD1H, LAIR1, TIM-1, TIM-4, CD39.

[0232] Other antibodies include antagonists of inhibitory receptors on NK cells and agonists of activating receptors on NK cells, e.g., KIR, TIGIT, NKG2A.

[0233] Generally, antibodies that may benefit from a modified heavy chain constant region include, e.g., agonist antibodies that ligate positive costimulatory receptors, blocking antibodies that attenuate signaling through inhibitory receptors, antagonist antibodies, and antibodies that increase systemically the frequency of anti-tumor T cells, antibodies that overcome distinct immune suppressive pathways within the tumor microenvironment (e.g., block inhibitory receptor engagement (e.g., PD-L1/PD-1 interactions), deplete or inhibit Tregs (e.g., an anti-CD25 monoclonal antibody, inhibit metabolic enzymes such as IDO, or reverse/prevent T cell anergy or exhaustion) and antibodies that trigger innate immune activation and/or inflammation at tumor sites. An increased internalization of inhibitory receptors may translate into a lower level of a potential inhibitor.

[0234] In certain embodiments, an antibody comprising a modified heavy chain constant region is an antibody that is conjugated to a therapeutic agent to form an immunoconjugate, such as an antibody drug conjugate (ADC), which immunoconjugate requires internalization for its activity. In an ADC, the antibody functions as a targeting agent for directing the ADC to a target cell expressing its antigen, such as an antigen on a cancer cell. In this case, the antigen may be a tumor associated antigen, i.e., one that is uniquely expressed or overexpressed by the cancer cell. Once there, the drug is released, either inside the target cell or in its vicinity, to act as a therapeutic agent. For a review on the mechanism of action and use of ADCs in cancer therapy, see Schrama et al., Nature Rev. Drug Disc. 2006, 5, 147.

[0235] For cancer treatment, the therapeutic agent or drug of an ADC preferably is a cytotoxic drug that causes death of the targeted cancer cell. Cytotoxic drugs that can be used in ADCs include the following types of compounds and their analogs and derivatives:
[0236] (a) enediynes such as calicheamicin (see, e.g., Lee et al., J. Am. Chem. Soc. 1987, 109, 3464 and 3466) and uncialamycin (see, e.g., Davies et al., WO 2007/038868 A2 (2007) and Chowdari et al., U.S. Pat. No. 8,709,431 B2 (2012));
[0237] (b) tubulysins (see, e.g., Domling et al., U.S. Pat. No. 7,778,814 B2 (2010); Cheng et al., U.S. Pat. No. 8,394,922 B2 (2013); and Cong et al., US 2014/0227295 A1;
[0238] (c) CC-1065 and duocarmycin (see, e.g., Boger, U.S. Pat. No. 6,5458,530 B1 (2003); Sufi et al., U.S. Pat. No. 8,461,117 B2 (2013); and Zhang et al., US 2012/0301490 A1 (2012));
[0239] (d) epothilones (see, e.g., Vite et al., US 2007/0275904 A1 (2007) and U.S. RE42930 E (2011));
[0240] (e) auristatins (see, e.g., Senter et al., U.S. Pat. No. 6,844,869 B2 (2005) and Doronina et al., U.S. Pat. No. 7,498,298 B2 (2009));
[0241] (f) pyrrolobezodiazepine (PBD) dimers (see, e.g., Howard et al., US 2013/0059800 A1(2013); US 2013/0028919 A1 (2013); and WO 2013/041606 A1 (2013)); and
[0242] (g) maytansinoids such as DM1 and DM4 (see, e.g., Chari et al., U.S. Pat. No. 5,208,020 (1993) and Amphlett et al., U.S. Pat. No. 7,374,762 B2 (2008)).

[0243] In ADCs, the antibody and therapeutic agent may be conjugated via a linker, e.g., a cleavable linker, such as a peptidyl, disulfide, or hydrazone linker. For example, the linker may be a peptidyl linker such as Val-Cit, Ala-Val, Val-Ala-Val, Lys-Lys, Pro-Val-Gly-Val-Val, Ala-Asn-Val, Val-Leu-Lys, Ala-Ala-Asn, Cit-Cit, Val-Lys, Lys, Cit, Ser, or Glu. The ADCs can be prepared as described in U.S. Pat. Nos. 7,087,600; 6,989,452; and 7,129,261; PCT Publications WO 02/096910; WO 07/038658; WO 07/051081; WO 07/059404; WO 08/083312; and WO 08/103693; U.S. Patent Publications 20060024317; 20060004081; and 20060247295; the disclosures of which are incorporated herein by reference.

[0244] Exemplary targets of ADCs that may be enhanced with a modified heavy chain constant region include B7H4 (Korman et al., US 2009/0074660 A1); CD19 (Rao-Naik et al., 8,097,703 B2); CD22 (King et al., US 2010/0143368 A1); CD30 (Keler et al., U.S. Pat. No. 7,387,776 B2 (2008); CD70 (Terrett et al., U.S. Pat. No. 8,124,738 B2); CTLA-4 (Korman et al., U.S. Pat. No. 6,984,720 B1 (2006)); PD-1 (Korman et al., U.S. Pat. No. 8,008,449 B2 (2011); PSMA (Huang et al., US 2009/0297438 A1 and Cardarelli et al., U.S. Pat. No. 7,875,278 B2); PTK7 (Terrett et al., US 2010/0034826 A1); glypican-3 (Terrett et al., US 2010/0209432 (A1)); RG1 (Harkins et al., U.S. Pat. No. 7,335,748 B2(2008)); mesothelin (Terrett et al., U.S. Pat. No. 8,268,970 B2 (2012)); and CD44 (Xu et al., US 2010/0092484 A1).

[0245] The modified heavy chain constant domains may also be part of antibodies for uses outside of oncology, e.g., immunological diseases, such as rheumatoid arthritis, lupus etc.

[0246] The modified heavy chain constant domains may also be fused to non antibody molecules (or antibody variants) or fragments thereof, and may be fused to any polypeptide that needs the presence of an Fc. A modified heavy chain constant domain may be fused to an antigen binding fragment of an antibody, as further defined herein (e.g., in the definition section).

IV. Antibodies with Modified Heavy Chain Constant Regions with Reduced Effector Function and Target Antigens Thereof

[0247] Antibodies or fusion proteins with heavy chain constant regions having reduced binding to at least some FcgRs and/or reduced effector function may bind to any kind of target antigens for applications in which effector activity is not desired. For example, they may be used in antibodies that are antagonists and/or which block the activity of a cell surface molecule. These may be used in treatment of cancer, as well as treatment of immune and other diseases. Target antigens for antibodies comprising a heavy chain constant domain or portion thereof comprising a substitution at one or more of amino acid residues L234, L235, P238, G237 and K322 include all of those described elsewhere herein, such as in Section III.

[0248] In certain embodiments, a heavy chain constant domain or portion thereof comprising comprising a substitution at one or more of amino acid residues L234, L235, P238, G237 and K322, such as a P238K mutation and optionally a mutation at L234, L235, G237 and K322, which is devoid of certain effector function, is fused to a polypeptide, e.g., the heavy chain portion of an antigen binding fragment of an antibody. As further described herein, an IgG, e.g., IgG1, Fc comprising a P238K mutation, and comprising, e.g., the amino acid sequence set forth in SEQ ID NO: 198, may be fused to a heavy chain variable domain of an antibody, wherein the antibody binds to any target, e.g., a target protein described herein (e.g., CD40 or CD40L). An IgG1 Fc with a P238K mutation (e.g., P238K IgG1 fa having the amino acid sequence SEQ ID NO: 198 or in the context of IgG1 having allotype f) may be used in any antibody or with any antigen binding fragment thereof for which effector function, in particular binding to FcγRs CD32a, CD32b and CD16a, is not desired. In addition to P238K, a heavy chain constant region may comprise an additional 1 or 2 mutations, e.g., substitutions, that reduce binding to FcγR CD64, or P238K may be used in the context of an IgG2 hinge, e.g., an IgG2 hinge comprising C219S, as further described herein.

### V. Methods of Modifying the Biological Activity of Antibodies

[0249] Provided herein are methods for enhancing the biological activity of certain antibodies, such as the one or more of the following biological activities:

[0250] (a) increased or altered internalization by a cell;

[0251] (b) increased or altered agonist activity;

[0252] (c) increased or altered antagonist or blocking activity;

[0253] (d) enhanced or reduced ADCC;

[0254] (d) generation of a new property;

[0255] (e) increased or altered signal transduction;

[0256] (f) formation of larger antibody/antigen cross-linked complexes;

[0257] (g) increased clustering or oligomerization of the target cell surface molecule;

[0258] (h) increased stimulation or enhancement of an immune response; and/or

[0259] (i) increased inhibition of an immune response.

[0260] A method for enhancing a biological activity of an antibody may comprise replacing the heavy chain constant region or a portion thereof, e.g., the hinge and/or CH1 domain, with a modified heavy chain constant region or portion thereof, e.g., an IgG2 hinge and/or IgG2 CH1 domain.

[0261] In certain embodiments, a method for improving or modifying the biological activity of an antibody comprises (i) providing an antibody that does not comprise a modified heavy chain constant region as described herein; and (ii) replacing the heavy chain constant region of the antibody with a modified heavy chain constant region, or a portion thereof, that enhance or modifies the biological activity of the antibody. In certain embodiments, a method for improving the biological activity of an antibody comprises (i) providing an antibody that comprises a non-IgG2 hinge (e.g., an IgG1 hinge, an IgG3 hinge or an IgG4 hinge); and (ii) replacing the non-IgG2 hinge of the antibody with an IgG2 hinge. In certain embodiments, a method for improving the biological activity of an antibody comprises (i) providing an antibody that comprises a non-enhancing IgG2 hinge; and (ii) replacing the non-enhancing IgG2 hinge of the antibody with an IgG2 hinge. A “non-enhancing IgG2 hinge” is a variant IgG2 hinge that differs from an IgG2 hinge in such a way that it no longer has the required characteristic for enhancing the biologic activity of an antibody, e.g., a variant hinge that no longer has the stiffness of a wildtype IgG2 hinge.

[0262] Exemplary methods for enhancing the biological activity of an antibody comprise (i) providing an antibody that comprises a non-IgG2 hinge or a non-enhancing IgG2 hinge, and (ii) replacing the hinge with a hinge comprising SEQ ID NO: 8, 21, 22, 23, 126-132, 134-136 or 137 or variants thereof, e.g., the variants described herein. Methods for enhancing the biological activity of an antibody may also comprise (i) providing an antibody that comprises heavy chain constant region that is not a modified heavy chain constant region, and (ii) replacing the heavy chain constant region with a modified heavy chain constant region. Replacing the heavy chain constant region may comprise replacing the CH1, hinge, CH2 and/or CH3 domain. For example, a heavy chain constant region may be modified, by replacing the hinge with an IgG2 hinge or variant thereof, and/or by replacing the CH1 domain with an IgG1 or IgG2 CH1 domain or variant thereof. In certain embodiments, the hinge is replaced with an IgG2 hinge and the CH2 domain is replaced with an IgG1 CH2 domain. In certain embodiments, the hinge is replaced with an IgG2 hinge and the CH3 domain is replaced with an IgG1 CH3 domain. In certain embodiments, the hinge is replaced with an IgG2 hinge, the CH1 is replaced with an IgG2 hinge, the CH2 domain is replaced with an IgG1 CH2 domain and the CH3 domain is replaced with an IgG1 CH3 domain. In certain embodiments, a heavy chain constant region is replaced with a modified heavy chain regions 1-27 set forth in Table 5 above or the heavy chain constant regions set forth in Table 6 or described herein.

[0263] Also provided herein are methods for enhancing the biological activity of an IgG1 or IgG2 antibody, comprising deleting 1-10 amino acids in the hinge of the IgG1 or IgG2 antibody, respectively. For example, one or more of amino acids S219, C22, D221, K222, T223, H224 and T225 can be deleted. In one embodiment, all of amino acids S219, C22, D221, K222, T223, H224 and T225 are deleted.

[0264] Similar methods as those described above for modified heavy chain constant regions that enhance internalization or agonist activity may be used for those having reduced effector function. For example, provided herein are methods for making and providing effectorless antibodies or antigen-binding fragments thereof, e.g., by mutating P238, e.g., to P238K, to eliminate or reduce the effector function of an antibody.

[0265] In certain embodiments, replacing the heavy chain constant region of an antibody, e.g., to modify its biological activity, is not accompanied by a reduction or a significant reduction of its binding activity to the target antigen. As described in the Examples, substituting the heavy chain constant region of anti-GITR and anti-CD73 antibodies did not significantly change their affinity for the human GITR and human CD73 antigens, respectively.

[0266] It will be understood that when referring to replacing a domain of a specific isotype with the same domain of a different isotype or with a domain including a mutation, e.g., a P238 mutation, it is not necessary to literally replace the domain, but rather, it may only be necessary to change the amino acids that are different between the two isotypes.

[0267] Standard assays to evaluate the binding ability of the antibodies toward an antigen of various species are known in the art and are further described herein, and include for example, ELISAs, Western blots, and RIAs. Suitable assays are described in detail in the Examples. The binding kinetics (e.g., binding affinity) of the antibodies also can be assessed by standard assays known in the art, such as by BIACORE® SPR analysis. Assays to evaluate the properties of antibodies having modified constant regions (e.g., ligand binding, T cell proliferation, cytokine production) are described in further detail infra and in the Examples.

[0268] Exemplary antibodies that can be modified as described herein include, e.g., antibodies for treating cancer, such as: Yervoy™ (ipilimumab) or Tremelimumab (to CTLA-4), galiximab (to B7.1), BMS-936558 (to PD-1), CT-011 (to PD-1), MK-3475 (to PD-1), AMP224 (to B7DC), BMS-936559 (to B7-H1), MPDL3280A (to B7-H1), MEDI-570 (to ICOS), AMG557 (to B7H2), MGA271 (to B7H3), IMP321 (to LAG-3), BMS-663513 (to CD137), PF-05082566 (to CD137), CDX-1127 (to CD27), anti-OX40 (Providence Health Services), huMAbOX40L (to OX40L), Atacicept (to TACI), CP-870893 (to CD40), Lucatumumab (to CD40), Dacetuzumab (to CD40), Muromonab-CD3 (to CD3), Ipilumumab (to CTLA-4).

[0269] Other antibodies that can be modified as described herein include PD-1 and PD-L1 antagonist antibodies. An exemplary anti-PD-1 antibody that may be modified as described herein is nivolumab (BMS-936558); an antibody that comprises the CDRs or variable regions of one of antibodies 17D8, 2D3, 4H1, 5C4, 7D3, 5F4 and 4A11 described in WO 2006/121168; MK-3475 (Lambrolizumab) described in WO2012/145493; AMP-514 described in WO 2012/145493; CT-011 (Pidilizumab; previously CT-AcTibody or BAT; see, e.g., Rosenblatt et al. (2011) J. Immunotherapy 34:409); those described in WO 2009/014708, WO 03/099196, WO 2009/114335, WO 2011/066389, WO 2011/161699, WO 2012/145493, WO2013/173223, U.S. Pat. Nos. 7,635,757 and 8,217,149, and U.S. Patent Publication No. 2009/0317368.

[0270] Further antibodies that may be modified include anti-PD-L1 antibodies, e.g., BMS-936559 (referred to as 12A4 in WO 2007/005874 and U.S. Pat. No. 7,943,743); an antibody that comprises the CDRs or variable regions of 3G10, 12A4, 10A5, 5F8, 10H10, 1B12, 7H1, 11E6, 12B7 and 13G4, which are described in PCT Publication WO 07/005874 and U.S. Pat. No. 7,943,743; MEDI4736 (also known as Anti-B7-H1); MPDL3280A (also known as RG7446); any of the anti-PD-L1 antibodies disclosed in WO2013/173223, WO2011/066389, WO2012/145493, U.S. Pat. Nos. 7,635,757 and 8,217,149 and U.S. Publication No. 2009/145493.

[0271] Other antibodies that may be modified include anti-CTLA-4 antibodies, e.g., Yervoy™ (ipilimumab or antibody 10D1, described in PCT Publication WO 01/14424); tremelimumab (formerly ticilimumab, CP-675,206); monoclonal or an anti-CTLA-4 antibody described in any of the following publications: WO 98/42752; WO 00/37504; U.S. Pat. No. 6,207,156; Hurwitz et al. (1998) Proc. Natl. Acad. Sci. USA 95(17):10067-10071; Camacho et al. (2004) J. Clin. Oncology 22(145): Abstract No. 2505 (antibody CP-675206); and Mokyr et al. (1998) Cancer Res. 58:5301-5304; and any of the anti-CTLA-4 antibodies disclosed in WO2013/173223.

[0272] Other antibodies that may be modified include anti-LAG-3 antibodies, e.g., BMS-986016; IMP731 described in US 2011/007023; and IMP-321.

[0273] Other antibodies that may be modified include anti-GITR agonist antibodies, e.g., the anti-GITR antibody 6C8 or humanized versions thereof, described in WO2006/105021; an antibody described in WO2011/028683; and an antibody described in JP2008278814.

[0274] Antibodies that target other antigens, including those described elsewhere herein, may also be modified. For example, anti-Her2 antibodies that require internalization, e.g., trastuzumab (Herceptin), may be modified as described herein.

### VI. Additional Heavy Chain Constant Domain Modifications

[0275] In addition to the modifications described herein to antibodies to enhance their biological activity or reduce effector function, further mutations can be made, e.g., to the CH1, hinge, CH2 or CH3 domain, e.g., to further reduce the effector function, binding to FcγRs, and/or the stability of the antibodies. For example, any of the modifications described herein, e.g., below, may be combined with a a substitution at one or more of amino acid residues L234, L235, P238, G237 and K322, e.g., a P238K, mutation, such as in an IgG1 or IgG1-IgG2 hybrid Fc or portion thereof.

### Fcs and Modified Fcs

[0276] Antibodies described herein may comprise an Fc comprising one or more modifications, typically to alter one or more functional properties of the antibody, such as serum half-life, complement fixation, Fc receptor binding, and/or

[0277] antigen-dependent cellular cytotoxicity. For example, one may make modifications in the Fc region in order to generate an Fc variant with (a) increased or decreased antibody-dependent cell-mediated cytotoxicity (ADCC), (b) increased or decreased complement mediated cytotoxicity (CDC), (c) increased or decreased affinity for C1q and/or (d) increased or decreased affinity for a Fc receptor relative to the parent Fc. Such Fc region variants will generally comprise at least one amino acid modification in the Fc region. Combining amino acid modifications is thought to be particularly desirable. For example, the variant Fc region may include two, three, four, five, etc substitutions therein, e.g. of the specific Fc region positions identified herein. Exemplary Fc sequence variants are disclosed herein, and are also provided at U.S. Pat. Nos. 5,624,821; 6,277,375; 6,737,056; 6,194,551; 7,317,091; 8,101,720; PCT Patent Publications WO 00/42072; WO 01/58957; WO 04/016750; WO 04/029207; WO 04/035752; WO 04/074455; WO 04/099249; WO 04/063351; WO 05/070963; WO 05/040217, WO 05/092925 and WO 06/020114.

### Reducing Effector Function

[0278] ADCC activity may be reduced by modifying the Fc region. In certain embodiments, sites that affect binding to Fc receptors may be removed (e.g., by mutation), preferably sites other than salvage receptor binding sites. In other embodiments, an Fc region may be modified to remove an ADCC site. ADCC sites are known in the art; see, for example, Sarmay et al. (1992) Molec. Immunol. 29 (5): 633-9 with regard to ADCC sites in IgG1. In one embodiment, the G236R and L328R variant of human IgG1 effectively eliminates FcγR binding. Horton et al. (2011) J. Immunol. 186:4223 and Chu et al. (2008) Mol. Immunol. 45:3926. In other embodiments, the Fc having reduced binding to FcγRs comprised the amino acid substitutions L234A, L235E and G237A. Gross et al. (2001) Immunity 15:289.

[0279] CDC activity may also be reduced by modifying the Fc region. Mutations at IgG1 positions D270, K322, P329 and P331, specifically alanine mutations D270A, K322A, P329A and P331A, significantly reduce the ability of the corresponding antibody to bind C1q and activate complement. Idusogie et al. (2000) J. Immunol. 164:4178; WO 99/51642. Modification of position 331 of IgG1 (e.g. P331S) has been shown to reduce complement binding. Tao et al. (1993) J. Exp. Med. 178:661 and Canfield & Morrison (1991) J. Exp. Med. 173:1483. In another example, one or more amino acid residues within amino acid positions 231 to 239 are altered to thereby reduce the ability of the antibody to fix complement. WO 94/29351.

[0280] In some embodiments, the Fc with reduced complement fixation has the amino acid substitutions A330S and P331S. Gross et al. (2001) Immunity 15:289.

[0281] For uses where effector function is to be avoided altogether, e.g. when antigen binding alone is sufficient to generate the desired therapeutic benefit, and effector function only leads to (or increases the risk of) undesired side effects, IgG4 antibodies may be used, or antibodies or fragments lacking the Fc region or a substantial portion thereof can be devised, or the Fc may be mutated to eliminate glycosylation altogether (e.g. N297A). Alternatively, a hybrid construct of human IgG2 (C_{H}1 domain and hinge region) and human IgG4 (C_{H}2 and C_{H}3 domains) has been generated that is devoid of effector function, lacking the ability to bind the FcγRs (like IgG2) and unable to activate complement (like IgG4). Rother et al. (2007) Nat. Biotechnol. 25:1256. See also Mueller et al. (1997) Mol. Immunol. 34:441; Labrijn et al. (2008) Curr. Op. Immunol. 20:479 (discussing Fc modifications to reduce effector function generally).

[0282] In other embodiments, the Fc region is altered by replacing at least one amino acid residue with a different amino acid residue to reduce all effector function(s) of the antibody. For example, one or more amino acids selected from amino acid residues 234, 235, 236, 237, 297, 318, 320 and 322 can be replaced with a different amino acid residue such that the antibody has decreased affinity for an effector ligand but retains the antigen-binding ability of the parent antibody. The effector ligand to which affinity is altered can be, for example, an Fc receptor (residues 234, 235, 236, 237, 297) or the C1 component of complement (residues 297, 318, 320, 322). U.S. Pat. Nos. 5,624,821 and 5,648,260, both by Winter et al.

[0283] WO 88/007089 proposed modifications in the IgG Fc region to decrease binding to FcγRI to decrease ADCC (234A; 235E; 236A; G237A) or block binding to complement component C1q to eliminate CDC (E318A or V/K320A and K322A/Q). See also Duncan & Winter (1988) Nature 332:563; Chappel et al. (1991) Proc. Nat'l Acad. Sci. (USA) 88:9036; and Sondermann et al. (2000) Nature 406:267 (discussing the effects of these mutations on FcγRIII binding).

[0284] Fc modifications reducing effector function also include substitutions, insertions, and deletions at positions 234, 235, 236, 237, 267, 269, 325, and 328, such as 234G, 235G, 236R, 237K, 267R, 269R, 325L, and 328R. An Fc variant may comprise 236R/328R. Other modifications for reducing FcγR and complement interactions include substitutions 297A, 234A, 235A, 237A, 318A, 228P, 236E, 268Q, 309L, 330S, 331 S, 220S, 226S, 229S, 238S, 233P, and 234V. These and other modifications are reviewed in Strohl (2009) Current Opinion in Biotechnology 20:685-691. Effector functions (both ADCC and complement activation) can be reduced, while maintaining neonatal FcR binding (maintaining half-life), by mutating IgG residues at one or more of positions 233-236 and 327-331, such as E233P, L234V, L235A, optionally G236Δ, A327G, A330S and P331S in IgG1; E233P, F234V, L235A, optionally G236Δ in IgG4; and A330S and P331S in IgG2. See Armour et al. (1999) Eur. J. Immunol. 29:2613; WO 99/58572. Other mutations that reduce effector function include L234A and L235A in IgG1 (Alegre et al. (1994) Transplantation 57:1537); V234A and G237A in IgG2 (Cole et al. (1997) J. Immunol. 159:3613; see also U.S. Pat. No. 5,834,597); and S228P and L235E for IgG4 (Reddy et al. (2000) J. Immunol. 164:1925). Another combination of mutations for reducing effector function in a human IgG1 include L234F, L235E and P331S. Oganesyan et al. (2008) Acta Crystallogr. D. Biol. Crystallogr. 64:700. See generally Labrijn et gal. (2008) Curr. Op. Immunol. 20:479. Additional mutations found to decrease effector function in the context of an Fc (IgG1) fusion protein (abatacept) are C226S, C229S and P238S (EU residue numbering). Davis et al. (2007) J. Immunol. 34:2204.

[0285] Other Fc variants having reduced ADCC and/or CDC are disclosed at Glaesner et al. (2010) Diabetes Metab. Res. Rev. 26:287 (F234A and L235A to decrease ADCC and ADCP in an IgG4); Hutchins et al. (1995) Proc. Nat'l Acad. Sci. (USA) 92:11980 (F234A, G237A and E318A in an IgG4); An et al. (2009) MAbs 1:572 and U.S. Pat. App. Pub. 2007/0148167 (H268Q, V309L, A330S and P331S in an IgG2); McEarchern et al. (2007) Blood 109:1185 (C226S, C229S, E233P, L234V, L235A in an IgG1); Vafa et al. (2014) Methods 65:114 (V234V, G237A, P238S, H268A, V309L, A330S, P331S in an IgG2).

[0286] In certain embodiments, an Fc is chosen that has essentially no effector function, i.e., it has reduced binding to FcγRs and reduced complement fixation. An exemplary Fc, e.g., IgG1 Fc, that is effectorless comprises the following five mutations: L234A, L235E, G237A, A330S and P331S. Gross et al. (2001) Immunity 15:289. These five substitutions may be combined with N297A to eliminate glycosylation as well.

### Enhancing Effector Function

[0287] Alternatively, ADCC activity may be increased by modifying the Fc region. With regard to ADCC activity, human IgG1≥IgG3>>IgG4≥IgG2, so an IgG1 constant domain, rather than an IgG2 or IgG4, might be chosen for use in a drug where ADCC is desired. Alternatively, the Fc region may be modified to increase antibody dependent cellular cytotoxicity (ADCC) and/or to increase the affinity for an Fcγ receptor by modifying one or more amino acids at the following positions: 234, 235, 236, 238, 239, 240, 241, 243, 244, 245, 247, 248, 249, 252, 254, 255, 256, 258, 262, 263, 264, 265, 267, 268, 269, 270, 272, 276, 278, 280, 283, 285, 286, 289, 290, 292, 293, 294, 295, 296, 298, 299, 301, 303, 305, 307, 309, 312, 313, 315, 320, 322, 324, 325, 326, 327, 329, 330, 331, 332, 333, 334, 335, 337, 338, 340, 360, 373, 376, 378, 382, 388, 389, 398, 414, 416, 419, 430, 433, 434, 435, 436, 437, 438 or 439. See WO 2012/142515; see also WO 00/42072. Exemplary substitutions include 236A, 239D, 239E, 268D, 267E, 268E, 268F, 324T, 332D, and 332E. Exemplary variants include 239D/332E, 236A/332E, 236A/239D/332E, 268F/324T, 267E/268F, 267E/324T, and 267E/268F/324T. For example, human IgG1Fcs comprising the G236A variant, which can optionally be combined with 1332E, have been shown to increase the FcγIIA/FcγIIB binding affinity ratio approximately 15-fold. Richards et al. (2008) Mol. Cancer Therap. 7:2517; Moore et al. (2010) mAbs 2:181. Other modifications for enhancing FcγR and complement interactions include but are not limited to substitutions 298A, 333A, 334A, 326A, 247I, 339D, 339Q, 280H, 290S, 298D, 298V, 243L, 292P, 300L, 396L, 3051, and 396L. These and other modifications are reviewed in Strohl (2009) Current Opinion in Biotechnology 20:685-691. Specifically, both ADCC and CDC may be enhanced by changes at position E333 of IgG1, e.g. E333A. Shields et al. (2001) J. Biol. Chem. 276:6591. The use of P247I and A339D/Q mutations to enhance effector function in an IgG1 is disclosed at WO 2006/020114, and D280H, K290S±S298D/V is disclosed at WO 2004/074455. The K326A/W and E333A/S variants have been shown to increase effector function in human IgG1, and E333S in IgG2. Idusogie et al. (2001) J. Immunol. 166:2571.

[0288] Specifically, the binding sites on human IgG1 for FcγR1, FcγRII, FcγRIII and FcRn have been mapped, and variants with improved binding have been described. Shields et al. (2001) J. Biol. Chem. 276:6591-6604. Specific mutations at positions 256, 290, 298, 333, 334 and 339 were shown to improve binding to FcγRIII, including the combination mutants T256A/S298A, S298A/E333A, S298A/K224A and S298A/E333A/K334A (having enhanced FcγRIIIa binding and ADCC activity). Other IgG1 variants with strongly enhanced binding to FcγRIIIa have been identified, including variants with S239D/I332E and S239D/1332E/A330L mutations which showed the greatest increase in affinity for FcγRIIIa, a decrease in FcγRIIb binding, and strong cytotoxic activity in cynomolgus monkeys. Lazar et al. (2006) Proc. Nat'l Acad Sci. (USA) 103:4005; Awan et al. (2010) Blood 115:1204; Desjarlais & Lazar (2011) Exp. Cell Res. 317:1278. Introduction of the triple mutations into antibodies such as alemtuzumab (CD52-specific), trastuzumab (HER2/neu-specific), rituximab (CD20-specific), and cetuximab (EGFR-specific) translated into greatly enhanced ADCC activity in vitro, and the S239D/I332E variant showed an enhanced capacity to deplete B cells in monkeys. Lazar et al. (2006) Proc. Nat'l Acad Sci. (USA) 103:4005. In addition, IgG1 mutants containing L235V, F243L, R292P, Y300L, V3051 and P396L mutations which exhibited enhanced binding to FcγRIIIa and concomitantly enhanced ADCC activity in transgenic mice expressing human FcγRIIIa in models of B cell malignancies and breast cancer have been identified. Stavenhagen et al. (2007) Cancer Res. 67:8882; U.S. Pat. No. 8,652,466; Nordstrom et al. (2011) Breast Cancer Res. 13:R123.

[0289] Different IgG isotypes also exhibit differential CDC activity (IgG3>IgG1>>IgG2≈4G4). Dangl et al. (1988) EMBO J. 7:1989. For uses in which enhanced CDC is desired, it is also possible to introduce mutations that increase binding to C1q. The ability to recruit complement (CDC) may be enhanced by mutations at K326 and/or E333 in an IgG2, such as K326W (which reduces ADCC activity) and E333S, to increase binding to C1q, the first component of the complement cascade. Idusogie et al. (2001) J. Immunol. 166:2571. Introduction of S267E/H268F/S324T (alone or in any combination) into human IgG1 enhances C1q binding. Moore et al. (2010) mAbs 2:181. The Fc region of the IgG1/IgG3 hybrid isotype antibody “113F” of Natsume et al. (2008) Cancer Res. 68:3863 (FIG. 1 therein) also confers enhanced CDC. See also Michaelsen et al. (2009) Scand. J. Immunol. 70:553 and Redpath et al. (1998) Immunology 93:595.

[0290] Additional mutations that can increase or decrease effector function are disclosed at Dall'Acqua et al. (2006) J. Immunol. 177:1129. See also Carter (2006) Nat. Rev. Immunol. 6:343; Presta (2008) Curr. Op. Immunol. 20:460.

[0291] Fc variants that enhance affinity for the inhibitory receptor FcγRIIb may also be used, e.g. to enhance apoptosis-inducing or adjuvant activity. Li & Ravetch (2011) Science 333:1030; Li & Ravetch (2012) Proc. Nat'l Acad. Sci (USA) 109:10966; U.S. Pat. App. Pub. 2014/0010812. Such variants may provide an antibody with immunomodulatory activities related to FcγRIIb⁺ cells, including for example B cells and monocytes. In one embodiment, the Fc variants provide selectively enhanced affinity to FcγRIIb relative to one or more activating receptors. Modifications for altering binding to FcγRIIb include one or more modifications at a position selected from the group consisting of 234, 235, 236, 237, 239, 266, 267, 268, 325, 326, 327, 328, and 332, according to the EU index. Exemplary substitutions for enhancing FcγRIIb affinity include but are not limited to 234D, 234E, 234F, 234W, 235D, 235F, 235R, 235Y, 236D, 236N, 237D, 237N, 239D, 239E, 266M, 267D, 267E, 268D, 268E, 327D, 327E, 328F, 328W, 328Y, and 332E. Exemplary substitutions include 235Y, 236D, 239D, 266M, 267E, 268D, 268E, 328F, 328W, and 328Y. Other Fc variants for enhancing binding to FcγRIIb include 235Y/267E, 236D/267E, 239D/268D, 239D/267E, 267E/268D, 267E/268E, and 267E/328F. Specifically, the S267E, G236D, S239D, L328F and I332E variants, including the 5267E+L328F double variant, of human IgG1 are of particular value in specifically enhancing affinity for the inhibitory FcγRIIb receptor. Chu et al. (2008) Mol. Immunol. 45:3926; U.S. Pat. App. Pub. 2006/024298; WO 2012/087928. Enhanced specificity for FcγRIIb (as distinguished from FcγRIIa^{R131}) may be obtained by adding the P238D substitution. Mimoto et al. (2013) Protein. Eng. Des. & Selection 26:589; WO 2012/115241.

### Glycosylation

[0292] Glycosylation of an antibody is modified to increase or decrease effector function. For example, an aglycoslated antibody can be made that lacks all effector function by mutating the conserved asparagine residue at position 297 (e.g. N297A), thus abolishing complement and FcγRI binding. Bolt et al. (1993) Eur. J. Immunol. 23:403. See also Tao & Morrison (1989) J. Immunol. 143:2595 (using N297Q in IgG1 to eliminate glycosylation at position 297).

[0293] Although aglycosylated antibodies generally lack effector function, mutations can be introduced to restore that function. Aglycosylated antibodies, e.g. those resulting from N297A/C/D/or H mutations or produced in systems (e.g. E. coli) that do not glycosylate proteins, can be further mutated to restore FcγR binding, e.g. S298G and/or T299A/G/or H (WO 2009/079242), or E382V and M428I (Jung et al. (2010) Proc. Nat'l Acad. Sci (USA) 107:604).

[0294] Additionally, an antibody with enhanced ADCC can be made by altering the glycosylation. For example, removal of fucose from heavy chain Asn297-linked oligosaccharides has been shown to enhance ADCC, based on improved binding to FcγRIIIa. Shields et al. (2002) JBC 277:26733; Niwa et al. (2005) J. Immunol. Methods 306: 151; Cardarelli et al. (2009) Clin. Cancer Res. 15:3376 (MDX-1401); Cardarelli et al. (2010) Cancer Immunol. Immunotherap. 59:257 (MDX-1342). Such low fucose antibodies may be produced, e.g., in knockout Chinese hamster ovary (CHO) cells lacking fucosyltransferase (FUT8) (Yamane-Ohnuki et al. (2004) Biotechnol. Bioeng. 87:614), or in other cells that generate afucosylated antibodies. See, e.g., Zhang et al. (2011) mAbs 3:289 and Li et al. (2006) Nat. Biotechnol. 24:210 (both describing antibody production in glycoengineered Pichia pastoris); Mossner et al. (2010) Blood 115:4393; Shields et al. (2002) J. Biol. Chem. 277:26733; Shinkawa et al. (2003) J. Biol. Chem. 278:3466; EP 1176195B1. ADCC can also be enhanced as described in PCT Publication WO 03/035835, which discloses use of a variant CHO cell line, Lec13, with reduced ability to attach fucose to Asn(297)-linked carbohydrates, also resulting in hypofucosylation of antibodies expressed in that host cell (see also Shields, R. L. et al. (2002) J. Biol. Chem. 277:26733-26740). Alternatively, fucose analogs may be added to culture medium during antibody production to inhibit incorporation of fucose into the carbohydrate on the antibody. WO 2009/135181.

[0295] Increasing bisecting GlcNac structures in antibody-linked oligosaccharides also enhances ADCC. PCT Publication WO 99/54342 by Umana et al. describes cell lines engineered to express glycoprotein-modifying glycosyl transferases (e.g., beta(1,4)-N-acetylglucosaminyltransferase III (GnTIII)) such that antibodies expressed in the engineered cell lines exhibit increased bisecting GlcNac structures which results in increased ADCC activity of the antibodies (see also Umana et al. (1999) Nat. Biotech. 17:176-180).

[0296] Additional glycosylation variants have been developed that are devoid of galactose, sialic acid, fucose and xylose residues (so-called GNGN glycoforms), which exhibit enhanced ADCC and ADCP but decreased CDC, as well as others that are devoid of sialic acid, fucose and xylose (so-called G1/G2 glycoforms), which exhibit enhanced ADCC, ADCP and CDC. U.S. Pat. App. Pub. No. 2013/0149300. Antibodies having these glycosylation patterns are optionally produced in genetically modified N. benthamiana plants in which the endogenous xylosyl and fucosyl transferase genes have been knocked-out.

[0297] Glycoengineering can also be used to modify the anti-inflammatory properties of an IgG construct by changing the α2,6 sialyl content of the carbohydrate chains attached at Asn297 of the Fc regions, wherein an increased proportion of α2,6 sialylated forms results in enhanced anti-inflammatory effects. See Nimmerjahn et al. (2008) Ann. Rev. Immunol. 26:513. Conversely, reduction in the proportion of antibodies having α2,6 sialylated carbohydrates may be useful in cases where anti-inflammatory properties are not wanted. Methods of modifying α2,6 sialylation content of antibodies, for example by selective purification of α2,6 sialylated forms or by enzymatic modification, are provided at U.S. Pat. Appl. Pub. No. 2008/0206246. In other embodiments, the amino acid sequence of the Fc region may be modified to mimic the effect of α2,6 sialylation, for example by inclusion of an F241A modification. WO 2013/095966.

[0298] Antibodies described herein can contain one or more glycosylation sites in either the light or heavy chain variable region. Such glycosylation sites may result in increased immunogenicity of the antibody or an alteration of the pK of the antibody due to altered antigen binding (Marshall et al (1972) Annu Rev Biochem 41:673-702; Gala and Morrison (2004) J. Immunol 172:5489-94; Wallick et al (1988) J Exp Med 168:1099-109; Spiro (2002) Glycobiology 12:43R-56R; Parekh et al (1985) Nature 316:452-7; Mimura et al. (2000) Mol Immunol 37:697-706). Glycosylation has been known to occur at motifs containing an N-X-S/T sequence.

### Biological Half-Life

[0299] In certain embodiments, the antibody is modified to increase its biological half-life. Various approaches are possible. For example, this may be done by increasing the binding affinity of the Fc region for FcRn. In one embodiment, the antibody is altered within the CH1 or CL region to contain a salvage receptor binding epitope taken from two loops of a CH2 domain of an Fc region of an IgG, as described in U.S. Pat. Nos. 5,869,046 and 6,121,022 by Presta et al. Other exemplary Fc variants that increase binding to FcRn and/or improve pharmacokinetic properties include substitutions at positions 259, 308, and 434, including for example 259I, 308F, 428L, 428M, 434S, 434H, 434F, 434Y, and 434M. Other variants that increase Fc binding to FcRn include: 250E, 250Q, 428L, 428F, 250Q/428L (Hinton et al., 2004, J. Biol. Chem. 279(8): 6213-6216, Hinton et al. 2006 Journal of Immunology 176:346-356), 256A, 272A, 305A, 307A, 311A, 312A, 378Q, 380A, 382A, 434A (Shields et al, Journal of Biological Chemistry, 2001, 276(9):6591-6604), 252F, 252Y, 252W, 254T, 256Q, 256E, 256D, 433R, 434F, 434Y, 252Y/254T/256E, 433K/434F/436H (Del'Acqua et al. Journal of Immunology, 2002, 169:5171-5180, Dall'Acqua et al., 2006, Journal of Biological Chemistry 281:23514-23524). See U.S. Pat. No. 8,367,805.

[0300] Modification of certain conserved residues in IgG Fc (1253/H310/Q311/H433/N434), such as the N434A variant (Yeung et al. (2009) J. Immunol. 182:7663), has been proposed as a way to increase FcRn affinity, thus increasing the half-life of the antibody in circulation. WO 98/023289. The combination Fc variant comprising M428L and N434S has been shown to increase FcRn binding and increase serum half-life up to five-fold. Zalev sky et al. (2010) Nat. Biotechnol. 28:157. The combination Fc variant comprising T307A, E380A and N434A modifications also extends half-life of IgG1 antibodies. Petkova et al. (2006) Int. Immunol. 18:1759. In addition, combination Fc variants comprising M252Y/M428L, M428L/N434H, M428L/N434F, M428L/N434Y, M428L/N434A, M428L/N434M, and M428L/N434S variants have also been shown to extend half-life. WO 2009/086320.

[0301] Further, a combination Fc variant comprising M252Y, S254T and T256E, increases half-life-nearly 4-fold. Dall'Acqua et al. (2006) J. Biol. Chem. 281:23514. A related IgG1 modification providing increased FcRn affinity but reduced pH dependence (M252Y/S254T/T256E/H433K/N434F) has been used to create an IgG1 construct (“MST-HN Abdeg”) for use as a competitor to prevent binding of other antibodies to FcRn, resulting in increased clearance of that other antibody, either endogenous IgG (e.g. in an autoimmune setting) or another exogenous (therapeutic) mAb. Vaccaro et al. (2005) Nat. Biotechnol. 23:1283; WO 2006/130834.

[0302] Other modifications for increasing FcRn binding are described in Yeung et al. (2010) J. Immunol. 182:7663-7671; 6,277,375; 6,821,505; WO 97/34631; WO 2002/060919.

[0303] In certain embodiments, hybrid IgG isotypes may be used to increase FcRn binding, and potentially increase half-life. For example, an IgG1/IgG3 hybrid variant may be constructed by substituting IgG1 positions in the CH2 and/or CH3 region with the amino acids from IgG3 at positions where the two isotypes differ. Thus a hybrid variant IgG antibody may be constructed that comprises one or more substitutions, e.g., 274Q, 276K, 300F, 339T, 356E, 358M, 384S, 392N, 397M, 4221, 435R, and 436F. In other embodiments described herein, an IgG1/IgG2 hybrid variant may be constructed by substituting IgG2 positions in the CH2 and/or CH3 region with amino acids from IgG1 at positions where the two isotypes differ. Thus a hybrid variant IgG antibody may be constructed that comprises one or more substitutions, e.g., one or more of the following amino acid substitutions: 233E, 234L, 235L, -236G (referring to an insertion of a glycine at position 236), and 327A. See U.S. Pat. No. 8,629,113. A hybrid of IgG1/IgG2/IgG4 sequences has been generated that purportedly increases serum half-life and improves expression. U.S. Pat. No. 7,867,491 (sequence number 18 therein).

[0304] The serum half-life of the antibodies of the present invention can also be increased by pegylation. An antibody can be pegylated to, for example, increase the biological (e.g., serum) half-life of the antibody. To pegylate an antibody, the antibody, or fragment thereof, typically is reacted with a polyethylene glycol (PEG) reagent, such as a reactive ester or aldehyde derivative of PEG, under conditions in which one or more PEG groups become attached to the antibody or antibody fragment. Preferably, the pegylation is carried out via an acylation reaction or an alkylation reaction with a reactive PEG molecule (or an analogous reactive water-soluble polymer). As used herein, the term “polyethylene glycol” is intended to encompass any of the forms of PEG that have been used to derivatize other proteins, such as mono (C1-C10) alkoxy- or aryloxy-polyethylene glycol or polyethylene glycol-maleimide. In certain embodiments, the antibody to be pegylated is an aglycosylated antibody. Methods for pegylating proteins are known in the art and can be applied to the antibodies described herein. See for example, EP 0154316 by Nishimura et al. and EP 0401384 by Ishikawa et al.

[0305] Alternatively, under some circumstances it may be desirable to decrease the half-life of an antibody of the present invention, rather than increase it. Modifications such as I253A (Hornick et al. (2000) J. Nucl. Med. 41:355) and H435A/R I253A or H310A (Kim et al. (2000) Eur. J. Immunol. 29:2819) in Fc of human IgG1 can decrease FcRn binding, thus decreasing half-life (increasing clearance) for use in situations where rapid clearance is preferred, such a medical imaging. See also Kenanova et al. (2005) Cancer Res. 65:622. Other means to enhance clearance include formatting the antigen binding domains of the present invention as antibody fragments lacking the ability to bind FcRn, such as Fab fragments. Such modification can reduce the circulating half-life of an antibody from a couple of weeks to a matter of hours. Selective PEGylation of antibody fragments can then be used to fine-tune (increase) the half-life of the antibody fragments if necessary. Chapman et al. (1999) Nat. Biotechnol. 17:780. Antibody fragments may also be fused to human serum albumin, e.g. in a fusion protein construct, to increase half-life. Yeh et al. (1992) Proc. Nat'l Acad. Sci. 89:1904. Alternatively, a bispecific antibody may be constructed with a first antigen binding domain of the present invention and a second antigen binding domain that binds to human serum albumin (HSA). See Int'l Pat. Appl. Pub. WO 2009/127691 and patent references cited therein. Alternatively, specialized polypeptide sequences can be added to antibody fragments to increase half-life, e.g. “XTEN” polypeptide sequences. Schellenberger et al. (2009) Nat. Biotechnol. 27:1186; Int'l Pat. Appl. Pub. WO 2010/091122.

### Stability

[0306] A potential protease cleavage site in the hinge of IgG1 constructs can be eliminated by D221G and K222S modifications, increasing the stability of the antibody. WO 2014/043344.

[0307] In certain embodiments, the antibodies described herein do not contain asparagine isomerism sites. The deamidation of asparagine may occur on N-G or D-G sequences and may result in the creation of an isoaspartic acid residue that may introduce a kink into the polypeptide chain and may decrease its stability (isoaspartic acid effect).

[0308] Each antibody will have a unique isoelectric point (pI), which generally falls in the pH range between 6 and 9.5. The pI for an IgG1 antibody typically falls within the pH range of 7-9.5 and the pI for an IgG4 antibody typically falls within the pH range of 6-8. There is speculation that antibodies with a pI outside the normal range may have some unfolding and instability under in vivo conditions. Thus, it is preferred to have an antibody that contains a pI value that falls in the normal range. This can be achieved either by selecting antibodies with a pI in the normal range or by mutating charged surface residues.

[0309] Each antibody will have a characteristic melting temperature, with a higher melting temperature indicating greater overall stability in vivo (Krishnamurthy R and Manning M C (2002) Curr Pharm Biotechnol 3:361-71). Generally, it is preferred that the T_{M1} (the temperature of initial unfolding) be greater than 60° C., preferably greater than 65° C., even more preferably greater than 70° C. The melting point of an antibody can be measured using differential scanning calorimetry (Chen et al (2003) Pharm Res 20:1952-60; Ghirlando et al (1999) Immunol Lett 68:47-52) or circular dichroism (Murray et al. (2002) J. Chromatogr Sci 40:343-9).

[0310] In a preferred embodiment, antibodies are selected that do not degrade rapidly. Degradation of an antibody can be measured using capillary electrophoresis (CE) and MALDI-MS (Alexander A J and Hughes D E (1995) Anal Chem 67:3626-32).

[0311] When using an IgG4 constant domain, it is usually preferable to include the substitution S228P, which mimics the hinge sequence in IgG1 and thereby stabilizes IgG4 molecules, e.g. reducing Fab-arm exchange between the therapeutic antibody and endogenous IgG4 in the patient being treated. Labrijn et al. (2009) Nat. Biotechnol. 27:767; Reddy et al. (2000) J. Immunol. 164:1925. Similarly, in IgG2 hinge containing antibodies a C219S and/or C220S mutation stabilizes the antibody comprising an IgG2 hinge.

### Aggregation

[0312] In another preferred embodiment, antibodies are selected that have minimal aggregation effects, which can lead to the triggering of an unwanted immune response and/or altered or unfavorable pharmacokinetic properties. Generally, antibodies are acceptable with aggregation of 25% or less, preferably 20% or less, even more preferably 15% or less, even more preferably 10% or less and even more preferably 5% or less. Aggregation can be measured by several techniques, including size-exclusion column (SEC), high performance liquid chromatography (HPLC), and light scattering.

### VII. Non-Antibody Proteins and Antibody Derivatives

[0313] The invention described herein may also be applied to molecules that are not full length antibodies, provided that they comprise a hinge. For example, IgG fusion proteins with an enhanced biologic activity or lack of effector function may be made. Accordingly, provided herein are fusion proteins comprising an active moiety linked, e.g., covalently linked, to an IgG constant region, e.g., an Fc region, comprising an IgG2 hinge and optionally a CH2 and CH3 domains or portions thereof, or linked to an IgG (e.g., an IgG1) or portion thereof with reduced effector function, e.g., comprising a mutation at P238, e.g., P238K. The Fc may be any Fc of a modified heavy chain constant region described herein, such as the Fc portions of the modified heavy chain constant regions set forth in Tables 5, 6 or in the Sequence Table.

[0314] Antibodies described herein may also be used for forming bispecific molecules or molecules for CAR-T therapy. An antibody, or antigen-binding portions thereof, can be derivatized or linked to another functional molecule, e.g., another peptide or protein (e.g., another antibody or ligand for a receptor) to generate a bispecific molecule that binds to at least two different binding sites or target molecules. Antibodies described herein may be derivatized or linked to more than one other functional molecule to generate multispecific molecules that bind to more than two different binding sites and/or target molecules; such multispecific molecules are also intended to be encompassed by the term “bispecific molecule” as used herein. To create a bispecific molecule, an antibody described herein can be functionally linked (e.g., by chemical coupling, genetic fusion, noncovalent association or otherwise) to one or more other binding molecules, such as another antibody, antibody fragment, peptide or binding mimetic, such that a bispecific molecule results.

### VIII. Compositions

[0315] Further provided are compositions, e.g., a pharmaceutical compositions, containing one or a combination of antibodies, or antigen-binding portion(s) thereof, described herein, formulated together with a pharmaceutically acceptable carrier. Such compositions may include one or a combination of (e.g., two or more different) antibodies, or immunoconjugates or bispecific molecules described herein. For example, a pharmaceutical composition described herein can comprise a combination of antibodies (or immunoconjugates or bispecifics) that bind to different epitopes on the target antigen or that have complementary activities.

[0316] In certain embodiments, a composition comprises an antibody described herein at a concentration of at least 1 mg/ml, 5 mg/ml, 10 mg/ml, 50 mg/ml, 100 mg/ml, 150 mg/ml, 200 mg/ml, 1-300 mg/ml, or 100-300 mg/ml.

[0317] Pharmaceutical compositions described herein also can be administered in combination therapy, i.e., combined with other agents. For example, the combination therapy can include an antibody described herein combined with at least one other anti-cancer and/or T-cell stimulating (e.g., activating) agent. Examples of therapeutic agents that can be used in combination therapy are described in greater detail below in the section on uses of the antibodies described herein.

[0318] In some embodiments, therapeutic compositions disclosed herein can include other compounds, drugs, and/or agents used for the treatment of cancer. Such compounds, drugs, and/or agents can include, for example, chemotherapy drugs, small molecule drugs or antibodies that stimulate the immune response to a given cancer. In some instances, therapeutic compositions can include, for example, one or more of an anti-CTLA-4 antibody, an anti-PD-1 antibody, an anti-PDL-1 antibody, an anti-OX40 (also known as CD134, TNFRSF4, ACT35 and/or TXGP1L) antibody, or an anti-LAG-3 antibody.

[0319] As used herein, “pharmaceutically acceptable carrier” includes any and all solvents, dispersion media, coatings, antibacterial and antifungal agents, isotonic and absorption delaying agents, and the like that are physiologically compatible. Preferably, the carrier is suitable for intravenous, intramuscular, subcutaneous, parenteral, spinal or epidermal administration (e.g., by injection or infusion). Depending on the route of administration, the active compound, i.e., antibody, immunoconjugate, or bispecific molecule, may be coated in a material to protect the compound from the action of acids and other natural conditions that may inactivate the compound.

[0320] The pharmaceutical compounds described herein may include one or more pharmaceutically acceptable salts. A “pharmaceutically acceptable salt” refers to a salt that retains the desired biological activity of the parent compound and does not impart any undesired toxicological effects (see e.g., Berge, S. M., et al. (1977) J. Pharm. Sci. 66:1-19). Examples of such salts include acid addition salts and base addition salts. Acid addition salts include those derived from nontoxic inorganic acids, such as hydrochloric, nitric, phosphoric, sulfuric, hydrobromic, hydroiodic, phosphorous and the like, as well as from nontoxic organic acids such as aliphatic mono- and dicarboxylic acids, phenyl-substituted alkanoic acids, hydroxy alkanoic acids, aromatic acids, aliphatic and aromatic sulfonic acids and the like. Base addition salts include those derived from alkaline earth metals, such as sodium, potassium, magnesium, calcium and the like, as well as from nontoxic organic amines, such as N,N′-dibenzylethylenediamine, N-methylglucamine, chloroprocaine, choline, diethanolamine, ethylenediamine, procaine and the like.

[0321] A pharmaceutical composition described herein also may include a pharmaceutically acceptable anti-oxidant. Examples of pharmaceutically acceptable antioxidants include: (1) water soluble antioxidants, such as ascorbic acid, cysteine hydrochloride, sodium bisulfate, sodium metabisulfite, sodium sulfite and the like; (2) oil-soluble antioxidants, such as ascorbyl palmitate, butylated hydroxyanisole (BHA), butylated hydroxytoluene (BHT), lecithin, propyl gallate, alpha-tocopherol, and the like; and (3) metal chelating agents, such as citric acid, ethylenediamine tetraacetic acid (EDTA), sorbitol, tartaric acid, phosphoric acid, and the like.

[0322] Examples of suitable aqueous and nonaqueous carriers that may be employed in the pharmaceutical compositions described herein include water, ethanol, polyols (such as glycerol, propylene glycol, polyethylene glycol, and the like), and suitable mixtures thereof, vegetable oils, such as olive oil, and injectable organic esters, such as ethyl oleate. Proper fluidity can be maintained, for example, by the use of coating materials, such as lecithin, by the maintenance of the required particle size in the case of dispersions, and by the use of surfactants.

[0323] These compositions may also contain adjuvants such as preservatives, wetting agents, emulsifying agents and dispersing agents. Prevention of presence of microorganisms may be ensured both by sterilization procedures, supra, and by the inclusion of various antibacterial and antifungal agents, for example, paraben, chlorobutanol, phenol sorbic acid, and the like. It may also be desirable to include isotonic agents, such as sugars, sodium chloride, and the like into the compositions. In addition, prolonged absorption of the injectable pharmaceutical form may be brought about by the inclusion of agents which delay absorption such as aluminum monostearate and gelatin.

[0324] Pharmaceutically acceptable carriers include sterile aqueous solutions or dispersions and sterile powders for the extemporaneous preparation of sterile injectable solutions or dispersion. The use of such media and agents for pharmaceutically active substances is known in the art. Except insofar as any conventional media or agent is incompatible with the active compound, use thereof in the pharmaceutical compositions described herein is contemplated. Supplementary active compounds can also be incorporated into the compositions.

[0325] Therapeutic compositions typically must be sterile and stable under the conditions of manufacture and storage. The composition can be formulated as a solution, microemulsion, liposome, or other ordered structure suitable to high drug concentration. The carrier can be a solvent or dispersion medium containing, for example, water, ethanol, polyol (for example, glycerol, propylene glycol, and liquid polyethylene glycol, and the like), and suitable mixtures thereof. The proper fluidity can be maintained, for example, by the use of a coating such as lecithin, by the maintenance of the required particle size in the case of dispersion and by the use of surfactants. In many cases, it will be preferable to include isotonic agents, for example, sugars, polyalcohols such as mannitol, sorbitol, or sodium chloride in the composition. Prolonged absorption of the injectable compositions can be brought about by including in the composition an agent that delays absorption, for example, monostearate salts and gelatin.

[0326] Sterile injectable solutions can be prepared by incorporating the active compound in the required amount in an appropriate solvent with one or a combination of ingredients enumerated above, as required, followed by sterilization microfiltration. Generally, dispersions are prepared by incorporating the active compound into a sterile vehicle that contains a basic dispersion medium and the required other ingredients from those enumerated above. In the case of sterile powders for the preparation of sterile injectable solutions, the preferred methods of preparation are vacuum drying and freeze-drying (lyophilization) that yield a powder of the active ingredient plus any additional desired ingredient from a previously sterile-filtered solution thereof.

[0327] The amount of active ingredient which can be combined with a carrier material to produce a single dosage form will vary depending upon the subject being treated, and the particular mode of administration. The amount of active ingredient which can be combined with a carrier material to produce a single dosage form will generally be that amount of the composition which produces a therapeutic effect. Generally, out of one hundred percent, this amount will range from about 0.01 percent to about ninety-nine percent of active ingredient, preferably from about 0.1 percent to about 70 percent, most preferably from about 1 percent to about 30 percent of active ingredient in combination with a pharmaceutically acceptable carrier.

[0328] Dosage regimens are adjusted to provide the optimum desired response (e.g., a therapeutic response). For example, a single bolus may be administered, several divided doses may be administered over time or the dose may be proportionally reduced or increased as indicated by the exigencies of the therapeutic situation. It is especially advantageous to formulate parenteral compositions in dosage unit form for ease of administration and uniformity of dosage. Dosage unit form as used herein refers to physically discrete units suited as unitary dosages for the subjects to be treated; each unit contains a predetermined quantity of active compound calculated to produce the desired therapeutic effect in association with the required pharmaceutical carrier. The specification for the dosage unit forms described herein are dictated by and directly dependent on (a) the unique characteristics of the active compound and the particular therapeutic effect to be achieved, and (b) the limitations inherent in the art of compounding such an active compound for the treatment of sensitivity in individuals.

[0329] For administration of the antibody, the dosage ranges from about 0.0001 to 100 mg/kg, and more usually 0.01 to 5 mg/kg, of the host body weight. For example dosages can be 0.3 mg/kg body weight, 1 mg/kg body weight, 3 mg/kg body weight, 5 mg/kg body weight or 10 mg/kg body weight or within the range of 1-10 mg/kg. An exemplary treatment regime entails administration once per week, once every two weeks, once every three weeks, once every four weeks, once a month, once every 3 months or once every three to 6 months. Preferred dosage regimens for an antibody described herein include 1 mg/kg body weight or 3 mg/kg body weight via intravenous administration, with the antibody being given using one of the following dosing schedules: (i) every four weeks for six dosages, then every three months; (ii) every three weeks; (iii) 3 mg/kg body weight once followed by 1 mg/kg body weight every three weeks.

[0330] In some methods, two or more monoclonal antibodies with different binding specificities are administered simultaneously, in which case the dosage of each antibody administered falls within the ranges indicated. Antibody is usually administered on multiple occasions. Intervals between single dosages can be, for example, weekly, monthly, every three months or yearly. Intervals can also be irregular as indicated by measuring blood levels of antibody to the target antigen in the patient. In some methods, dosage is adjusted to achieve a plasma antibody concentration of about 1-1000 μg/ml and in some methods about 25-300 μg/ml.

[0331] An antibody can be administered as a sustained release formulation, in which case less frequent administration is required. Dosage and frequency vary depending on the half-life of the antibody in the patient. In general, human antibodies show the longest half-life, followed by humanized antibodies, chimeric antibodies, and nonhuman antibodies. The dosage and frequency of administration can vary depending on whether the treatment is prophylactic or therapeutic. In prophylactic applications, a relatively low dosage is administered at relatively infrequent intervals over a long period of time. Some patients continue to receive treatment for the rest of their lives. In therapeutic applications, a relatively high dosage at relatively short intervals is sometimes required until progression of the disease is reduced or terminated, and preferably until the patient shows partial or complete amelioration of symptoms of disease. Thereafter, the patient can be administered a prophylactic regime.

[0332] Actual dosage levels of the active ingredients in the pharmaceutical compositions described herein may be varied so as to obtain an amount of the active ingredient which is effective to achieve the desired therapeutic response for a particular patient, composition, and mode of administration, without being toxic to the patient. The selected dosage level will depend upon a variety of pharmacokinetic factors including the activity of the particular compositions described herein employed, or the ester, salt or amide thereof, the route of administration, the time of administration, the rate of excretion of the particular compound being employed, the duration of the treatment, other drugs, compounds and/or materials used in combination with the particular compositions employed, the age, sex, weight, condition, general health and prior medical history of the patient being treated, and like factors well known in the medical arts.

[0333] A “therapeutically effective dosage” of an antibody described herein preferably results in a decrease in severity of disease symptoms, an increase in frequency and duration of disease symptom-free periods, or a prevention of impairment or disability due to the disease affliction. In the context of cancer, a therapeutically effective dose preferably prevents further deterioration of physical symptoms associated with cancer. Symptoms of cancer are well-known in the art and include, for example, unusual mole features, a change in the appearance of a mole, including asymmetry, border, color and/or diameter, a newly pigmented skin area, an abnormal mole, darkened area under nail, breast lumps, nipple changes, breast cysts, breast pain, death, weight loss, weakness, excessive fatigue, difficulty eating, loss of appetite, chronic cough, worsening breathlessness, coughing up blood, blood in the urine, blood in stool, nausea, vomiting, liver metastases, lung metastases, bone metastases, abdominal fullness, bloating, fluid in peritoneal cavity, vaginal bleeding, constipation, abdominal distension, perforation of colon, acute peritonitis (infection, fever, pain), pain, vomiting blood, heavy sweating, fever, high blood pressure, anemia, diarrhea, jaundice, dizziness, chills, muscle spasms, colon metastases, lung metastases, bladder metastases, liver metastases, bone metastases, kidney metastases, and pancreatic metastases, difficulty swallowing, and the like.

[0334] A therapeutically effective dose may prevent or delay onset of cancer, such as may be desired when early or preliminary signs of the disease are present. Laboratory tests utilized in the diagnosis of cancer include chemistries, hematology, serology and radiology. Accordingly, any clinical or biochemical assay that monitors any of the foregoing may be used to determine whether a particular treatment is a therapeutically effective dose for treating cancer. One of ordinary skill in the art would be able to determine such amounts based on such factors as the subject's size, the severity of the subject's symptoms, and the particular composition or route of administration selected.

[0335] A composition described herein can be administered via one or more routes of administration using one or more of a variety of methods known in the art. As will be appreciated by the skilled artisan, the route and/or mode of administration will vary depending upon the desired results. Preferred routes of administration for antibodies described herein include intravenous, intramuscular, intradermal, intraperitoneal, subcutaneous, spinal or other parenteral routes of administration, for example by injection or infusion. The phrase “parenteral administration” as used herein means modes of administration other than enteral and topical administration, usually by injection, and includes, without limitation, intravenous, intramuscular, intraarterial, intrathecal, intracapsular, intraorbital, intracardiac, intradermal, intraperitoneal, transtracheal, subcutaneous, subcuticular, intraarticular, subcapsular, subarachnoid, intraspinal, epidural and intrasternal injection and infusion.

[0336] Alternatively, an antibody described herein can be administered via a non-parenteral route, such as a topical, epidermal or mucosal route of administration, for example, intranasally, orally, vaginally, rectally, sublingually or topically.

[0337] The active compounds can be prepared with carriers that will protect the compound against rapid release, such as a controlled release formulation, including implants, transdermal patches, and microencapsulated delivery systems. Biodegradable, biocompatible polymers can be used, such as ethylene vinyl acetate, polyanhydrides, polyglycolic acid, collagen, polyorthoesters, and polylactic acid. Many methods for the preparation of such formulations are patented or generally known to those skilled in the art. See, e.g., Sustained and Controlled Release Drug Delivery Systems, J. R. Robinson, ed., Marcel Dekker, Inc., New York, 1978.

[0338] Therapeutic compositions can be administered with medical devices known in the art. For example, in a preferred embodiment, a therapeutic composition described herein can be administered with a needleless hypodermic injection device, such as the devices disclosed in U.S. Pat. Nos. 5,399,163; 5,383,851; 5,312,335; 5,064,413; 4,941,880; 4,790,824; or 4,596,556. Examples of well-known implants and modules for use with antibodies described herein include: U.S. Pat. No. 4,487,603, which discloses an implantable micro-infusion pump for dispensing medication at a controlled rate; U.S. Pat. No. 4,486,194, which discloses a therapeutic device for administering medicants through the skin; U.S. Pat. No. 4,447,233, which discloses a medication infusion pump for delivering medication at a precise infusion rate; U.S. Pat. No. 4,447,224, which discloses a variable flow implantable infusion apparatus for continuous drug delivery; U.S. Pat. No. 4,439,196, which discloses an osmotic drug delivery system having multi-chamber compartments; and U.S. Pat. No. 4,475,196, which discloses an osmotic drug delivery system. These patents are incorporated herein by reference. Many other such implants, delivery systems, and modules are known to those skilled in the art.

[0339] In certain embodiments, the antibodies described herein can be formulated to ensure proper distribution in vivo. For example, the blood-brain barrier (BBB) excludes many highly hydrophilic compounds. To ensure that the therapeutic compounds described herein cross the BBB (if desired), they can be formulated, for example, in liposomes. For methods of manufacturing liposomes, see, e.g., U.S. Pat. Nos. 4,522,811; 5,374,548; and 5,399,331. The liposomes may comprise one or more moieties which are selectively transported into specific cells or organs, thus enhance targeted drug delivery (see, e.g., V. V. Ranade (1989) J. Clin. Pharmacol. 29:685). Exemplary targeting moieties include folate or biotin (see, e.g., U.S. Pat. No. 5,416,016 to Low et al.); mannosides (Umezawa et al., (1988) Biochem. Biophys. Res. Commun. 153:1038); antibodies (P. G. Bloeman et al. (1995) FEBS Lett. 357:140; M. Owais et al. (1995) Antimicrob. Agents Chemother. 39:180); surfactant protein A receptor (Briscoe et al. (1995) Am. J. Physiol. 1233:134); p120 (Schreier et al. (1994) J. Biol. Chem. 269:9090); see also K. Keinanen; M. L. Laukkanen (1994) FEBS Lett. 346:123; J. J. Killion; I. J. Fidler (1994) Immunomethods 4:273.

### IX. Uses and Methods

[0340] The antibodies, antibody compositions and methods described herein have numerous in vitro and in vivo utilities involving, for example, the treatment of various disorders, e.g., cancers and immune disease. For example, antibodies described herein can be administered to cells in culture, in vitro or ex vivo, or to human subjects, e.g., in vivo. Accordingly, provided herein are methods of treatment of a subject comprising administering to the subject an antibody comprising a modified heavy chain constant region, such that treatment occurs. Also provided herein are methods of modifying an immune response in a subject comprising administering to the subject an antibody such that the immune response in the subject is modified. Preferably, the response is enhanced, stimulated or up-regulated. However, in other embodiments, an immune response is inhibited.

[0341] Preferred subjects include human patients in whom enhancement of an immune response would be desirable. Methods using modified heavy chain constant regions having enhanced internalization or agonist activity may be used for treating human patients having a disorder that can be treated by augmenting an immune response (e.g., the T-cell mediated immune response). In a particular embodiment, the methods may be suitable for treatment of cancer in vivo. In one embodiment, the subject is a tumor-bearing subject and an immune response against the tumor is stimulated. A tumor may be a solid tumor or a liquid tumor, e.g., a hematological malignancy. In certain embodiments, a tumor is an immunogenic tumor. In certain embodiments, a tumor is non-immunogenic. In certain embodiments, a tumor is PD-L1 positive. In certain embodiments a tumor is PD-L1 negative. A subject may also be a virus-bearing subject and an immune response against the virus is stimulated.

[0342] Further provided are methods for inhibiting growth of tumors in a subject comprising administering to the subject an antibody described herein such that growth of the tumor is inhibited in the subject. Also provided are methods of treating viral infection in a subject comprising administering to the subject an antibody described herein such that the viral infection is treated in the subject.

[0343] Also encompassed herein are methods for depleting Treg cells from the tumor microenvironment of a subject having a tumor, e.g., cancerous tumor, comprising administering to the subject a therapeutically effective amount of an antibody described herein that comprises an Fc that stimulates depletion of T_{reg} cells in the tumor microenvironment. An Fc may, e.g., be an Fc with effector function or enhanced effector function, such as binding or having enhanced binding to one or more activating Fc receptors.

[0344] In certain embodiments, an antibody comprising a modified heavy chain constant region binds to a stimulatory molecule and inhibits its activity, i.e., is an antagonist of a stimulatory molecule, or the antibody binds to an inhibitory molecule and stimulates its activity, i.e., is an agonist of an inhibitory molecule. Such antibodies may be used for treating disease in which the immune system or an immune response should be downregulated, e.g., autoimmune diseases or to prevent transplant rejections.

### Cancer

[0345] Provided herein are methods for treating a subject having cancer, comprising administering to the subject antibody described herein, such that the subject is treated, e.g., such that growth of cancerous tumors is inhibited or reduced and/or that the tumors regress. For example, activation of GITR by anti-GITR antibodies can enhance the immune response to cancerous cells in the patient. The antibody can be used alone to inhibit the growth of cancerous tumors. Alternatively, the antibody can be used in conjunction with another agent, e.g., other immunogenic agents, standard cancer treatments, or other antibodies, as described below.

[0346] Cancers whose growth may be inhibited using the antibodies described herein include cancers typically responsive or non-responsive to immunotherapy. Non-limiting examples of cancers for treatment include squamous cell carcinoma, small-cell lung cancer, non-small cell lung cancer, squamous non-small cell lung cancer (NSCLC), non NSCLC, glioma, gastrointestinal cancer, renal cancer (e.g. clear cell carcinoma), ovarian cancer, liver cancer, colorectal cancer, endometrial cancer, kidney cancer (e.g., renal cell carcinoma (RCC)), prostate cancer (e.g. hormone refractory prostate adenocarcinoma), thyroid cancer, neuroblastoma, pancreatic cancer, glioblastoma (glioblastoma multiforme), cervical cancer, stomach cancer, bladder cancer, hepatoma, breast cancer, colon carcinoma, and head and neck cancer (or carcinoma), gastric cancer, germ cell tumor, pediatric sarcoma, sinonasal natural killer, melanoma (e.g., metastatic malignant melanoma, such as cutaneous or intraocular malignant melanoma), bone cancer, skin cancer, uterine cancer, cancer of the anal region, testicular cancer, carcinoma of the fallopian tubes, carcinoma of the endometrium, carcinoma of the cervix, carcinoma of the vagina, carcinoma of the vulva, cancer of the esophagus, cancer of the small intestine, cancer of the endocrine system, cancer of the parathyroid gland, cancer of the adrenal gland, sarcoma of soft tissue, cancer of the urethra, cancer of the penis, solid tumors of childhood, cancer of the ureter, carcinoma of the renal pelvis, neoplasm of the central nervous system (CNS), primary CNS lymphoma, tumor angiogenesis, spinal axis tumor, brain stem glioma, pituitary adenoma, Kaposi's sarcoma, epidermoid cancer, squamous cell cancer, T-cell lymphoma, environmentally-induced cancers including those induced by asbestos, virus-related cancers (e.g., human papilloma virus (HPV)-related tumor), and hematologic malignancies derived from either of the two major blood cell lineages, i.e., the myeloid cell line (which produces granulocytes, erythrocytes, thrombocytes, macrophages and mast cells) or lymphoid cell line (which produces B, T, NK and plasma cells), such as all types of luekemias, lymphomas, and myelomas, e.g., acute, chronic, lymphocytic and/or myelogenous leukemias, such as acute leukemia (ALL), acute myelogenous leukemia (AML), chronic lymphocytic leukemia (CLL), and chronic myelogenous leukemia (CML), undifferentiated AML (M0), myeloblastic leukemia (M1), myeloblastic leukemia (M2; with cell maturation), promyelocytic leukemia (M3 or M3 variant [M3V]), myelomonocytic leukemia (M4 or M4 variant with eosinophilia [M4E]), monocytic leukemia (M5), erythroleukemia (M6), megakaryoblastic leukemia (M7), isolated granulocytic sarcoma, and chloroma; lymphomas, such as Hodgkin's lymphoma (HL), non-Hodgkin's lymphoma (NHL), B-cell lymphomas, T-cell lymphomas, lymphoplasmacytoid lymphoma, monocytoid B-cell lymphoma, mucosa-associated lymphoid tissue (MALT) lymphoma, anaplastic (e.g., Ki 1+) large-cell lymphoma, adult T-cell lymphoma/leukemia, mantle cell lymphoma, angio immunoblastic T-cell lymphoma, angiocentric lymphoma, intestinal T-cell lymphoma, primary mediastinal B-cell lymphoma, precursor T-lymphoblastic lymphoma, T-lymphoblastic; and lymphoma/leukaemia (T-Lbly/T-ALL), peripheral T-cell lymphoma, lymphoblastic lymphoma, post-transplantation lymphoproliferative disorder, true histiocytic lymphoma, primary central nervous system lymphoma, primary effusion lymphoma, lymphoblastic lymphoma (LBL), hematopoietic tumors of lymphoid lineage, acute lymphoblastic leukemia, diffuse large B-cell lymphoma, Burkitt's lymphoma, follicular lymphoma, diffuse histiocytic lymphoma (DHL), immunoblastic large cell lymphoma, precursor B-lymphoblastic lymphoma, cutaneous T-cell lymphoma (CTLC) (also called mycosis fungoides or Sezary syndrome), and lymphoplasmacytoid lymphoma (LPL) with Waldenstrom's macroglobulinemia; myelomas, such as IgG myeloma, light chain myeloma, nonsecretory myeloma, smoldering myeloma (also called indolent myeloma), solitary plasmocytoma, and multiple myelomas, chronic lymphocytic leukemia (CLL), hairy cell lymphoma; hematopoietic tumors of myeloid lineage, tumors of mesenchymal origin, including fibrosarcoma and rhabdomyoscarcoma; seminoma, teratocarcinoma, tumors of the central and peripheral nervous, including astrocytoma, schwannomas; tumors of mesenchymal origin, including fibrosarcoma, rhabdomyoscaroma, and osteosarcoma; and other tumors, including melanoma, xeroderma pigmentosum, keratoacanthoma, seminoma, thyroid follicular cancer and teratocarcinoma, hematopoietic tumors of lymphoid lineage, for example T-cell and B-cell tumors, including but not limited to T-cell disorders such as T-prolymphocytic leukemia (T-PLL), including of the small cell and cerebriform cell type; large granular lymphocyte leukemia (LGL) preferably of the T-cell type; a/d T-NHL hepatosplenic lymphoma; peripheral/post-thymic T cell lymphoma (pleomorphic and immunoblastic subtypes); angiocentric (nasal) T-cell lymphoma; cancer of the head or neck, renal cancer, rectal cancer, cancer of the thyroid gland; acute myeloid lymphoma, as well as any combinations of said cancers. The methods described herein may also be used for treatment of metastatic cancers, refractory cancers (e.g., cancers refractory to previous immunotherapy, e.g., with a blocking CTLA-4 or PD-1 antibody), and recurrent cancers.

### EXAMPLES

### Example 1: Enhanced Internalization of Anti-CD73 Antibodies with an IgG2 Hinge Relative to the Same Antibodies with a Non-IgG2 Hinge

[0347] It had been observed that hybridoma derived anti-CD73 antibody 11F11, which has an IgG2 constant region, is more potent in cellular CD73 inhibition assays than the 11F11 antibody as an IgG1 or IgG1.1 (effectorless IgG1), and more potent than other anti-CD73 antibodies having IgG1 constant regions. Based at least on this observation, it was hypothesized that increased inhibitory activity of anti-CD73 antibodies having IgG2 hinges relative to those having non-IgG2 hinges, such as IgG1 hinges, was due to increased internalization of the antibodies. To test this hypothesis, anti-CD73 antibodies having IgG1 or IgG2 constant regions or portions thereof were tested in internalization assays.

[0348] The antibodies that were used are listed in Table 7 which provides the identities of each of the domains of the constant regions (all human) of each antibody, including specific mutations if present.

TABLE 7

| Name of | | | | | | HC SEQ | LC SEQ |
|---|---|---|---|---|---|---|---|
| antibody | VH | CH1 | Hinge | CH2 | CH3 | ID NO¹ | ID NO² |
| 11F11 | 11F11 | IgG2 | IgG2 | IgG2 | IgG2 | 44 | 72 |
| 4C3 | 4C3 | IgG1 | IgG1 | IgG1 | IgG1 | 45 | 73 |
| 6D11 | 6D11 | IgG1 | IgG1 | IgG1 | IgG1 | 46 | 74 |
| CD73.10- | CD73.10 | IgG2 | IgG2 (C219S) | IgG2 | IgG2 | 47 | 72 |
| IgG2-C219S | | | | | | | |
| CD73.10- | CD73.10 | IgG2 | IgG2 (C219S) | IgG1.1 | IgG2 | 48 | 72 |
| IgG2-C219S- | | | | (A330S/P331S) | | | |
| IgG1.1 | | | | | | | |
| CD73.10- | CD73.10 | IgG1.1 | IgG1.1 | IgG1.1 | IgG1.1 | 49 | 72 |
| IgG1.1 | | | (L234A/L235E/ | (A330S/P331S) | | | |
| | | | G237A) | | | | |
| CD73.4-IgG2- | CD73.10 | IgG2 | IgG2 (C219S) | IgG2 | IgG2 | 50 | 72 |
| C219S | | | | | | | |
| CD73.3- | CD73.3 | IgG1.1 | IgG1.1 | IgG1.1 | IgG1.1 | 51 | 73 |
| IgG1.1 | | | (L234A/L235E/ | (A330S/P331S) | | | |
| | | | G237A) | | | | |

¹SEQ ID NO of full length heavy chain
²SEQ ID NO of full length light chain

[0349] The antibodies were made by expressing the heavy and light chains in HEK293-6E cells, and culture media was harvested 5 days after transfection.

[0350] Binding of the constructs to FcγRs was measured. hCD64 and hCD32a-H131 binding data for IgG1.1 and IgG2 molecules were consistent with expected values for the different Fcs. IgG1.1f is the most inert Fc. IgG2 and IgG2-C219S showed typical FcR binding for IgG2. As expected, data for IgG2-C219S-G1.1f suggests significantly weaker binding than wild type IgG1 or IgG2, but increased binding compared to IgG1.1f.

[0351] The affinity of the antibodies for human CD73 was measured to determine whether the change of the constant region affects them. The affinities were determined by Surface Plasmon Resonance (SPR) as follows. CD73 binding kinetics and affinity were studied by surface Plasmon resonance (SPR) using a Biacore T100 instrument (GE Healthcare) at 25° C. This experiment tested the binding of the N-terminal domain of hCD73 (consisting of residues 26-336 of human CD73; termed N-hCD73) to antibodies that were captured on immobilized protein A surfaces. For these experiments, protein A (Pierce) was immobilized to a density of 3000-4000 RU on flow cells 1-4 of a CM5 sensor chip (GE Healthcare) using standard ethyl(dimethylaminopropyl) carbodiimide (EDC)/N-hydroxysuccinimide (NHS) chemistry, with ethanolamine blocking, in a running buffer of 0.01 M HEPES pH 7.4, 0.15 M NaCl, 3 mM EDTA, 0.005% v/v tween 20. Kinetic experiments were performed by first capturing antibodies (5-10 ug/ml) on the protein A surfaces using a 30 s contact time at 10 ul/min, with binding of 600, 200, 66.7, 22.2, 7.4, and 2.5 nM N-hCD73-his, using a 180 s association time and 360 s dissociation time at a flow rate of 30 ul/min. The running buffer for the kinetic experiments was 10 mM sodium phosphate, 130 mM sodium chloride, 0.05% tween 20, pH 7.1. The surfaces were regenerated after each cycle using two 30 s pulses of 10 mM glycine pH 1.5 at a flow rate of 30 μl/min. Sensogram data was double-referenced and then fitted to a 1:1 Langmuir model using Biacore T100 evaluation software v2.0.4, to determine the association rate constant (ka), the dissociation rate constant (kd), and the equilibrium dissociation constant (KD).

[0352] The results are shown in Table 8. The table compiles data from different experiments. For antibodies for which two sets of numbers are shown, each set corresponds to data obtained in a separate experiment.

TABLE 8

| mAb | Fc | ka (1/Ms) | kd (1/s) | KD (nM) |
|---|---|---|---|---|
| 11F11 | IgG2 | 2.6E+05 | 4.2E−04 | 1.6 |
| | | 2.9E+05 | 1.6E−04 | 0.56 |
| 4C3 | IgG1 | 2.2E+04 | 2.4E−03 | 110 |
| | | 2.4E+04 | 2.2E−03 | 92 |
| 6E11 | IgG1 | 5.7E+04 | 1.4E−03 | 25 |
| CD73.10 | IgG1.1 | 2.7E+05 | 1.3E−03 | 4.7 |
| CD73.10 | IgG2-C219S | 2.2E+05 | 1.4E−03 | 6.2 |
| | | 2.2E+05 | 1.8E−03 | 8.3 |
| CD73.10 | IgG2-C219S-I | 2.4E+05 | 1.4E−03 | 5.7 |
| | gG1.1 | 2.3E+05 | 1.60E−03 | 6.8 |
| CD73.4 | IgG2-C219S | 2.9E+05 | 1.6E−04 | 0.55 |
| | | 2.8E+05 | 3.3E−04 | 1.2 |
| | | 2.9E+05 | 3.7E−04 | 1.3 |
| CD73.3 | IgG1.1 | 1.6E+04 | 3.6E−03 | 220 |

[0353] The results indicate that the presence of the different constant regions in an antibody, e.g., CD73.10, did not change the affinity of the antibody to human CD73.

The internalization of anti-CD73 antibodies was measured in two different assays.

[0354] A. High-Content Internalization Assay (2 Hour Fixed Time Assay)

[0355] The anti-CD73 antibodies used to test anti-CD73 antibody dependent CD73 internalization in Calu6 cells by assessing cellular expression after 2 hours of antibody incubation. Cells (2,000 cells/well) in 20 μl of complete medium (Gibco RPMI Media 1640 with 10% heat inactivated fetal bovine serum) were plated in 384 BD Falcon plate and grown overnight at 37° C. 5% CO₂ and 95% humidity. Anti-CD73 antibodies were serially diluted with PBS buffer containing 0.2% BSA, and added 5 μl/well into the cell plate. The cells were incubated with antibodies for 2 hours at 37° C. 5% CO₂ and 95% humidity, followed by washing once with PBS buffer. Formaldehyde (final 4% in PBS) was then added into the cell plate at 20 ul/well, and the plate was incubated at room temperature for 10 minutes. Afterwards, all liquid was aspirated and cells were washed once with 30 ul PBS. Detection antibody (2.5 μg/well of anti-CD73 Ab CD73.10.IgG2C219S) was added at 15 μg/well into the fixed cell plate. The cells were incubated at 4° C. overnight. On the next day, the plate was washed twice with PBS buffer, followed by adding secondary antibody containing Alexa-488 goat anti human and DAPI, stained for 1 hour at room temperature. After 3 washes in PBS buffer, the plate was imaged on Arrayscan Vti (Cellomics, Pittsburgh, Pa.). IC₅₀ and Ymax were measured. Ymax was determined by comparing to 100 nM dose of 11F11 as internal maximum. All calculations were determined as a percentage of internalization compared to this control, which was set to 100%.

[0356] The results are provided in Table 9.

TABLE 9

| | Constant | Epitope | EC50 | |
|---|---|---|---|---|
| mAb | region | bin | (nM) | Ymax |
| 11F11 | IgG2 | 1 | 0.58 | 98 |
| 4D4 | IgG2 | 1 | 0.38 | 104 |
| 10D2 | IgG1 | 1 | ND | 29 |
| 24H2 | IgG1 | 1 | 8.2 | 51 |
| 7A11 | IgG1 | 1 | 2.59 | 50 |
| CD73.4 | IgG2-C219S- | 1 | 1.2 | 97 |
| | IgG1.1 | | | |
| CD73.10 | IgG1.1 | 1 | 6.18 | 64 |
| CD73.10 | IgG2-C219S | 1 | 0.67 | 99 |
| CD73.10 | IgG2-C219S- | 1 | 0.87 | 99 |
| | IgG1.1 | | | |

ND = Not Detected
NA = Not Applicable

[0357] The results show that anti-CD73 antibodies having an IgG2 hinge have a lower EC50 and higher Ymax.

[0358] Kinetic internalization studies were performed to assess the rate of internalization. Several cells lines were tested: H2228 cells, HCC15 cells, Calu6 cells, and NCI-H2030. Cells (2,000 cells/well) in 20 μl of complete medium (Gibco RPMI Media 1640 with 10% heat inactivated fetal bovine serum) were plated in 384 BD Falcon plate and grown overnight at 37° C. 5% CO₂ and 95% humidity. CD73 antibodies were diluted with PBS buffer containing 0.2% BSA to 10 μg/ml and added 5 μl/well into the cell plate. The cells were incubated with antibodies for 0-2 hour time course at 37° C., followed by washing once with PBS buffer. The cells were subsequently fixed with formaldehyde (final 4% in PBS) at room temperature for 10 minutes, and then washed once with 30 ul PBS. Detection antibody (2.5 μg/well anti-CD73 Abs CD73.10.IgG2C219S) were diluted with PBS buffer containing 0.2% BSA, and added 15 μl/well into the fixed cell plate. The plate was incubated at 4° C. for overnight. On the next day, after 3 washes in PBS buffer, Secondary antibody Alexa488-goat anti human with DAPI were added. The cells were stained for 60 minutes at room temperature, after 3 washes, images were acquired using Arrayscan Vti (Cellomics, Pittsburgh, Pa.). The results are provided in FIGS. 1A-J and Tables 10 and 11. The values in Table 10 derive from the data shown in FIGS. 1A-J.

TABLE 10

| | 11F11(IgG2) | 6E11(IgG1) | CD73.10.IgG1.1f |
|---|---|---|---|
| Cell line | T_{1/2} (min) | T_{1/2} (min) | T_{1/2} (min) |
| Calu6 | 3.9 | 60.9 | 14.4 |
| HCC44 | 3.3 | 27.9 | 23.5 |
| H2030 | 3.3 | 40.3 | 18.3 |
| H647 | 45.7 | N/A | N/A |
| H2228 | 10.9 | 36.5 | 35.7 |
| HCC15 | 2.2 | 84.4 | 37.9 |
| SKLU1 | 6.8 | 18.0 | 17.2 |
| SKMES1 | 2.2 | 62.8 | 32.3 |
| SW900 | 10.3 | 94.9 | 43.4 |

TABLE 11
T_{1/2} and % internalization of CD73 antibodies in 4 human cell lines

| | | | HCC15 | | | | | |
|---|---|---|---|---|---|---|---|---|
| | H228 cells | | cells | | Calu6 cells | | H2030 cells | |
| | | % | | % | | % | | % |
| | T_{1/2} | internal- | T_{1/2} | internal- | T_{1/2} | internal- | T_{1/2} | internal- |
| | min | ization | min | ization | min | ization | min | ization |
| CD73.11-IgG2CS | — | — | — | — | 4.1 | 89 | 4.6 | 85 |
| CD73.10-IgG2CS | 9.7 | 93 | 2.6 | 91 | 3.0 | 91 | 3.3 | 85 |
| CD73.10-IgG2CS- | 9.4 | 92 | 3.0 | 91 | 3.1 | 91 | 4.3 | 87 |
| IgG1.1f | | | | | | | | |
| CD73.4-IgG2CS | 13.8 | 94 | 3.1 | 94 | 6.5 | 88 | 3.7 | 89 |
| CD73.10-IgG1.1f | 35.7 | 33 | 37.9 | 71 | 14.4 | 63 | 18.3 | 67 |
| CD73.3-IgG1.1f | 16.5 | −47 | >240 | 38 | 111.4 | 79 | >120 | 27 |
| 11F11 | 10.9 | 96 | 2.2 | 94 | 3.9 | 87 | 3.3 | 90 |
| 4C3 | 7.6 | −48 | 141.5 | 28 | 0.6 | −6 | >120 | −34 |
| 6E11 | 36.5 | 13 | 84.4 | 64 | 107.4 | 68 | 40.32 | 51 |

[0359] The results indicate that 11F11 (an IgG2 antibody) internalized within minutes, reaching a plateau in 30 minutes, whereas 6E11 (an IgG1 antibody) internalized more slowly, reaching a plateau at about 1 hr (FIGS. 1A-J). Similarly, 11F11 with an IgG1 constant region internalized more slowly than 11F11 with an IgG2 constant region. This trend was observed in several cell lines (Tables 10 and 11 and FIGS. 1A-J).

[0360] B. Internalization Measured by Flow Cytometry

[0361] Anti-CD73 antibody mediated internalization of CD73 was also tested by flow cytometry. Indicated cells were incubated with 10 μg/mL of the indicated antibody for 30 minutes on ice, washed several times, and transferred to 37° C. for the indicated time. Cells were harvested at the same time after the indicated incubation time. Cells were stained with primary antibody again (same antibody used for initial incubation) followed by anti-human secondary antibody. Cells were then assayed for expression of CD73 by flow cytometry.

[0362] The results, which are shown in FIG. 1E and Table 11, are consistent with those obtained in the internalization assays described above, and indicate that, all antibodies with IgG2 hinge and CH1 induced rapid and complete internalization. The CD73 levels remained low after 22 hours post wash-out, indicating that internalization is durable.

[0363] Similar results shown in FIG. 1F and Table 11 were obtained in the NCI-H292 cell line in which the antibody was maintained in culture during the incubation time (no wash-out). Again, these data indicate rapid and significant internalization and maintenance of downregulation of endogenous CD73.

[0364] Internalization assays were also conducted with the human SNU-C1 (colon cancer cell line) and NCI-H1437 (non-small cell lung carcinoma cell line) cells. The results, which are shown in FIGS. 1I and J, also indicate rapid internalization with a maximal level reached within 5 hours and a maximal level of internalization of about 50% for CD73.4.IgG2-C219S-IgG1.1f in SNU-C1 and 60% for NCI-H1437 cells. FIGS. 1G and H show similar kinetics of internalization of CD73.4.IgG2-C219S-IgG1.1f in Calu6 and NCI-H292 cells. For graphs, which show % of CD73 internalized, this number was obtained as follows:

$$\% CD 73 internalized = 100 - ( \frac{{MFI}_{t = x} - {MFI}_{background}}{{MFI}_{t = 0} - {MFI}_{background}} \times 100 )$$

where for each antibody, MFIₜ₌ₓ is the MFI at a given timepoint and MFIₜ₌₀ is maximal fluorescence at t=0, and MFI_{background} is the MFI of the secondary Ab only.

TABLE 12
EC₅₀ of antibody mediated CD73 internalization in
several cell lines (data from FIGS. 1G-I)

| | | | | | | | SNU-Cl | | | | NCI-H1437 | |
|---|---|---|---|---|---|---|---|---|---|---|---|---|
| | Calu6 | | NCI-H292 | | SNU-Cl | | (no wash) | | NCI-H1437 | | (no wash) | |
| | Ymax | T_{1/2} | Ymax | T_{1/2} | Ymax | T_{1/2} | Ymax | T_{1/2} | Ymax | T_{1/2} | Ymax | T_{1/2} |
| | (%) | (hr) | (%) | (hr) | (%) | (hr) | (%) | (hr) | (%) | (hr) | (%) | (hr) |
| mAb- | 76.8 | 0.5661 | 77.64 | 0.2633 | 48.96 | 0.4954 | 38.39 | 1.025 | 63.12 | 0.3164 | 62.78 | 0.3418 |
| CD73.4- | | | | | | | | | | | | |
| IgG2- | | | | | | | | | | | | |
| IgG1.1f | | | | | | | | | | | | |
| mAb- | 75.59 | 0.6003 | 78.42 | 0.2766 | — | — | — | — | — | — | — | — |
| CD73.4- | | | | | | | | | | | | |
| IgG2 | | | | | | | | | | | | |
| mAb- | 44.99 | 1.737 | 51.49 | 0.2087 | 30.58 | 0.9915 | 33.16 | 2.33 | 49.76 | 0.4915 | 49.95 | 0.5384 |
| CD73.4- | | | | | | | | | | | | |
| IgG1.1f | | | | | | | | | | | | |

[0365] Thus, anti-CD73 antibodies with an IgG2 hinge internalize faster and to a greater extent relative to anti-CD73 antibodies with an IgG1 hinge.

### Example 2: Enhanced Agonist Activity of GITR Antibodies with an IgG2 Hinge Relative to the Same Antibodies with an IgG1 Hinge

[0366] This Example demonstrates that anti-GITR antibodies comprising an IgG2 hinge have an increased ability to induce IL-2 and IFN-γ secretion from T cells relative to the same antibodies that have an IgG1 hinge.

[0367] It had been observed in CHO-OKT3 and 3A9 assays described above that hybridoma derived antibodies, having an IgG2 constant region, are more potent in stimulating cytokine secretion than the same antibodies in which the heavy chain constant region was switched to that of IgG1 or an effectorless IgG1 (IgG1.1). Therefore, the effect of an IgG2 constant region or hinge was further tested on anti-GITR antibodies in these assays.

[0368] The heavy chain variable region of an anti-human GITR antibody (SEQ ID NO: 75) was linked to the heavy chain constant regions shown in Table 13. The light chain of the anti-GITR antibodies comprised SEQ ID NO: 77. Table 13 shows the identity of each domain of the constant regions:

TABLE 13
Heavy chain constant regions of antibodies used in this Example

| | | | | | SEQ ID |
|---|---|---|---|---|---|
| Name of antibody | CH1 | Hinge | CH2 | CH3 | NO* |
| anti-GITR | IgG2 | IgG2 | IgG2 | IgG2 | SEQ ID |
| | SEQ ID | SEQ ID NO:8 | SEQ ID NO:9 | SEQ ID | NO:52 |
| | NO:7 | | | NO:10 | |
| anti-GITR-IgG2 | IgG2 | IgG2 | IgG2 | IgG2 | SEQ ID |
| | SEQ ID | SEQ ID NO:8 | SEQ ID NO:9 | SEQ ID | NO:52 |
| | NO:7 | | | NO:10 | |
| anti-GITR-IgG1 | IgG1 | IgG1 | IgG1 | IgG1 | SEQ ID |
| | SEQ ID | SEQ ID NO:3 | SEQ ID NO:4 | SEQ ID | NO:53 |
| | NO:2 | | | NO:5 | |
| anti-GITR-IgG1.1 | IgG1.1 | IgG1.1 | IgG1.1 | IgG1.1 | SEQ ID |
| | SEQ ID | (L234A/L235E/G237A) | (A330S/P331S) | SEQ ID | NO:54 |
| | NO:2 | SEQ ID NO:25 | SEQ ID NO:24 | NO:5 | |
| anti-GITR-IgG2-IgG1 | IgG2 | IgG2/IgG1 hybrid | IgG1 | IgG1 | SEQ ID |
| or anti-GITR.g2.g1 | SEQ ID | SEQ ID NO:22 | SEQ ID NO:4 | SEQ ID | NO:55 |
| | NO:7 | | | NO:5 | |
| anti-GITR-IgG2-IgG1.1 | IgG2 | IgG2 | IgG1.1 | IgG1 | SEQ ID |
| or anti-GITR.g2.g1.1 | SEQ ID | SEQ ID NO:8 | (A330S/P331S) | SEQ ID | NO:56 |
| | NO:7 | | SEQ ID NO:24 | NO:5 | |

*SEQ ID NO of full-length heavy chain constant region

[0369] First, the binding affinities of these GITR antibodies were compared to those of GITR antibodies having an IgG1 hinge. The binding affinities of the anti-GITR antibodies to soluble GITR was determined by Biacore as follows. Anti-GITR antibodies were captured on human kappa coated chips (˜5KRUs; Southernbiotech cat #2060-01), and recombinant human GITR (rHGITR/Fc: R&D systems, CAT #689-GR) was flowed across the chip at concentrations of 500 nM, 250 nM, 125 nM, 62 nM, and 31 nM. The capture concentration of the mAb/volume was 2-40 μg/mL (5 μL at 10 μL/min). The antigen association time was 5 minutes at 15 μL/min, the antigen dissociation time was 6 minutes, and regeneration was performed with 50 mM HCl/50 mM NaOH (12 μL each at 100 μL/min).

[0370] The results, which are shown in FIG. 2, indicate that all three GITR antibodies having an IgG2 hinge have similar affinities for activated T cells as GITR antibodies have IgG1 or IgG1.1 constant region.

[0371] Next, the ability of GITR antibodies having an IgG1 constant region or IgG2 hinge/IgG1 Fc domain were tested for their ability to induce IL-2 and IFN-γ secretion from human donor T cells stimulated with anti-CD3scFv (OKT3)-expressing CHO cells. The CHO cells expressed low levels of OKT3 to promote suboptimal stimulation to be able to observe agonism by anti-GITR antibodies. CD4+ T cells from a donor were stimulated with OKT3 expressing CHO cells and an anti-GITR antibody, and IL-2 and IFN-y secretion was measured. The experiments were conducted as follows. For experiments with CD4+ T cells, CD4+ T cells were obtained from human PBMCs with RosetteSep Human CD4+ T cell enrichment cocktail (StemCell Technology #15062) according to the manufacturer's protocol. CHO cells expressing anti-CD3scFv (OKT3) (CHO-OKT3) were washed twice with RPMI medium and subjected to irradiation with a dosage of 50K Rad. Cells were harvested and resuspended in culture medium (RPMI-1640 supplemented with 10% Fetal Bovine Serum, 2 mM L-glutamine, 55 nM β-Mercaptoethanol, 1 mM sodium pyruvate, and 100U/mL Penicillin/streptomycin) at 2.5×10⁵/mL. 2.5×10⁴ CHO-OKT3 cells and 1×10⁵ T cells were seeded per well in a 96-well TC grade flat-bottom plate (Costar). Cells were incubated with an 8-point, 4-fold titration of GITR antibody starting at 40 μg/mL. An irrelevant hIgG1 was added at 40 μg/mL as an isotype control. A sample with cells only was included to show baseline activity without any treatment. Supernatant from each sample was harvested at day 2 for IL-2 measurement (only for assays with CD4+ T cells) (BD opt EIA Human IL-2 ELISA kit; BD Bioscience #555190) and at day 3 for IFN-γ measurement (BD optETA human IFN-g ELISA Kit; BD Bioscience #555142).

[0372] As shown in FIGS. 3A and B, the antibody with the IgG2 hinge/IgG1 Fc domain (anti-GITR.g2.g1) induced both IL-2 and IFN-γ secretion from T cells to a higher degree than the antibody with the IgG1 constant region (anti-GITR.g1). Similar results were obtained with the effectorless versions of these constant domains (FIG. 3C).

[0373] To further confirm the increased activation of T cells with the anti-GITR antibodies comprising an IgG2 hinge, IL-2 secretion in a different experimental format was tested. In this experiment, the ability of GITR antibodies to induce IL-2 secretion from 3A9-hGITR cells (mouse T cell hybridoma 3A9 cell line ectopically expressing human GITR) was tested as follows. Mouse T cell hybridoma 3A9 cell line which ectopically expresses human GITR (3A9-hGITR) was cultured on anti-CD3 monoclonal antibody-coated plates in the presence of increasing amounts of the indicated antibodies. 5×10⁴ 3A9-hGITR cells were cultured on plates coated with 1 μg/ml anti-CD3 antibody (Clone 145-2C11; BD Biosciences), and treated with the indicated concentrations of antibodies for 7 hours.

[0374] As shown in FIG. 4, all antibodies having the IgG2 hinge (anti-GITR.g2, anti-GITR.g2.g1f, and anti-GITR.g2.g1.f) induced IL-2 secretion from 3A9-hGITR cells to a higher degree than their IgG1 constant region containing counterparts (anti-GITR.g1f and anti-GITR.g1.1f).

[0375] These results collectively suggest that anti-GITR antibodies having an IgG2 hinge and g1 or g1.1 constant regions are more potent than the same antibodies having an IgG1 hinge.

### Example 3: Impact of Different Hinge/Fc Combinations on Size of Antibody/Antigen Complexes

[0376] As shown in the above Examples, anti-CD73 antibodies with an IgG2 hinge are better inhibitors of CD73 cellular activity and internalize better than the same antibodies with an IgG1 hinge and anti-GITR antibodies with an IgG2 hinge are more potent agonists than the same antibodies with an IgG1 hinge. Based on this observation, and the fact that an IgG2 hinge is stiffer than an IgG1 hinge, it was hypothesized that larger complexes are formed between an antigen and antibodies having an IgG2 hinge relative to antibodies having an IgG1 hinge. The following experiment was conducted to analyze this hypothesis.

[0377] The structure and oligomeric state of CD73/antibody complexes in solution were examined by SEC-MALS and DLS. For these studies, antibodies containing either an IgG1 or IgG2 constant region, were mixed at varying molar ratios with recombinant proteins comprising either the full length extracellular domain of human-CD73 containing a C-terminal polyhistidine tag (amino acid residues 26-546 of human-CD73, termed hCD73-his) or a fragment corresponding to the N-terminal domain of human-CD73 (amino acid residues 26-336, termed N-hCD73-his).

[0378] The oligomeric state of CD73/antibody complexes were examined by size-exclusion chromatography coupled to an in-line multi-angle light scattering detector (SEC-MALS). Isocratic separations were performed on a Shodex PROTEIN KW-803 column connected to an Prominence Shimadzu UFLC in buffer containing 200 mM K₂HPO₄, 150 mM NaCl, pH 6.8, containing 0.02% Na azide (0.1 μm filtered) running at 0.5 mL/min. Samples were injected onto the column using a SIL-20AC Prominence Shimadzu autosampler, and data were obtained from three online detectors connected in series: a Prominence SPD-20AD diode array UV/vis spectrophotometer followed by a Wyatt miniDAWN™ TREOS Multi-Angle Light Scattering Detector then a Wyatt Optilab T-rEX Refractive Index Detector. Data were collected and analyzed using Astra (Wyatt) and Labsolutions (Shimadzu) software.

[0379] Dynamic light scattering (DLS) studies were performed on a Wyatt DynaPro plate reader in 384 well plates at 25° C. Experimental parameters were 20 acquisitions of 5 s each per measurement, and measurements were recorded in quadruplicate, with the average and standard deviation reported. Intensity autocorrelation functions were fitted using the “Regularization” algorithm in the Dynamics software (Wyatt Technologies).

[0380] A summary of the SEC-MALS and DLS is provided in FIG. 6 and FIG. 7. Analysis of the antibodies alone, shows retention times (about 16-17 min), masses (140-150 kDa), and hydrodynamic radii (5.0-5.4 nm) for each antibody that are typical for a monomeric monoclonal antibody. The data for the hCD73-his protein is consistent with the protein adopting the expected dimeric structure in solution; in particular, the mass determined from the SEC-MALS data (120 kDa) is consistent with that expected for a CD73-his dimer (117 kDa) and inconsistent with what would be expected for a hCD73-his monomer (58.5 kDa). The data for N-hCD73 is consistent with the recombinant N-domain protein being monomeric in solution (SEC-MALS measured mass=38 kDa, compared to expected monomeric mass=35.0 kDa), which is expected because the region of the full length CD73 extracellular domain that is responsible for dimerization of the protein is contained within the C-terminal domain without contribution of N-domain residues.

[0381] Equimolar mixtures of a given antibody with N-hCD73-his were found to elute as a single species in the SEC with shorter retention time than the antibody or N-hCD73-his alone, as well as larger hydrodynamic radii (Rh) by DLS, which is consistent with the formation of complexes. MALS data indicate masses for these complexes of approximately 210 kDa. This is consistent with one N-hCD73-his molecule bound to each of the two Fab domains of a given antibody to form a 1:2 antibody:N-hCD73-his complex.

[0382] SEC-MALS data for mixtures of anti-CD73 antibodies with hCD73-his dimer shows that the mixture elutes earlier than either the hCD73-his or antibody alone, suggesting that complexes are formed. Comparing the data for mAbs that contain the same variable region but different constant domains, shows that the elution times for the complexes of hCD73-his with mAbs containing a IgG2 constant domains (IgG2-C219S, IgG2-C219S-IgG1.1f) are earlier than those for complexes of hCD73-his with mAbs containing an IgG1.1f constant domain. In addition, the MALS-determined masses for complexes of hCD73-his with mAbs containing an IgG2 constant domain are larger than those for complexes of hCD73-his with mAbs containing an IgG1 constant domain. DLS data further shows that the hydrodynamic radius of complexes of hCD73-his with mAbs containing a IgG2 constant domain are larger than those for complexes of hCD73-his with mAbs containing an IgG1 constant domain. For example, the SEC-MALS and DLS data for CD73.4 with three different constant regions (IgG2-C219S, IgG2-C219S-IgG1.1f, or IgG1.1f) is shown in FIG. 5. Here it can be seen that the complex of hCD73-his with CD73.4 containing the IgG2 constant domain have shorter retention times (FIG. 5A), larger hydrodynamic radii (FIG. 5B) and larger MALS-determined masses (FIG. 5C), as compared to the complexes of hCD73-his with CD73.4-IgG1.1f. Based on the MALS masses, a schematic model for the structure and stoichiometry of the complexes between hCD73-his and the antibodies is shown in FIG. 5D, where complexes containing CD73.4-IgG1.1f predominantly form smaller 2:2 (peak 1=˜550 kDa) or 4:4 mAb/CD73 dimer complexes (peak 2=˜1300 kDa), whereas CD73.4-IgG2-C219S or CD73.4-IgG2-C219S-IgG1.1f form much larger complexes (>3000 kDa) with hCD73-his, for which precise structure and stoichiometry cannot be confidently modeled.

[0383] Collectively the SEC-MALS and DLS data demonstrate that larger complexes are formed between hCD73-his and mAbs containing an IgG2 hinge region (IgG2-C219S or IgG2-C219S-IgG1.1f), compared to those containing the IgG1 hinge region (IgG1.1f).

### Example 4: CH1 of IgG2 Isotype Further Improves Antibody Mediated CD73 Internalization

[0384] Additional internalization assays were conducted in Calu6 and H292 cells to further discriminate the role of isotype on internalization. The internalization assays were conducted as described in Example 1A and 1B (flow cytometry protocol without the wash-out step of the antibodies), and the antibodies of varying hybrid isotypes shown in Table 14 were maintained in culture at 10 μg/mL during the incubation time. For the flow cytometry experiments, the method of Example 1B was adapted to high throughput analysis in 96 well plates (as opposed to 48 well plates) and with 50,000 cells per well.

TABLE 14
Constant regions tested with the variable regions of CD73.4:

| | SEQ ID NO of | |
|---|---|---|
| Constructs | constant region | Description |
| IgG1f | 78 | wild type IgG1f |
| IgG1.1f | 83 | standard inert IgG1.1f |
| IgG2.3 | 79 | IgG2 A-form (C219S) |
| IgG2.5 | 82 | IgG2 B-form (C131S) |
| IgG2.3G1-KH | 81 | CH1, upper hinge and lower |
| | | hinge/upper CH2 of IgG2.3, |
| | | all else IgG1f |
| IgG2.5G1-KH | 90 | CH1, upper hinge and lower |
| | | hinge/upper CH2 of IgG2.5, |
| | | all else IgG1f |
| IgG2.3G1-AY | 80 | CH1 and upper hinge of IgG2.3, |
| | | all else IgG1f |
| IgG2.5G1-AY | 89 | CH1 and upper hinge of IgG2.5, |
| | | all else IgG1f |
| IgG1-G2.3G1-KH | 93 | CH1 of IgG1, upper hinge and |
| | | lower hinge/upper CH2 of |
| | | IgG2.3, all else IgG1f |
| IgG1-G2.3G1-AY | 92 | CH1 of IgG1, upper hinge of |
| | | IgG2.3, all else IgG1f |
| IgG2.3G1.1f-KH | 84 | CH1, upper hinge and lower |
| | | hinge/upper CH2 of IgG2.3, |
| | | all else IgG1.1f |
| IgG2.5G1.1f-KH | 88 | CH1, upper hinge and lower |
| | | hinge/upper CH2 of IgG2.5, |
| | | all else IgG1.1f |
| IgG1-deltaTHT | 85 | IgG1 with THT sequence removed |
| | | from hinge |
| IgG2.3-plusTHT | 86 | IgG2.3 with THT sequence |
| | | (from IgG1) added into hinge |
| IgG2.5-plusTHT | 91 | IgG2.5 with THT sequence |
| | | (from IgG1) added into hinge |
| IgG2.3-plusGGG | 87 | IgG2.3 with flexible GGG sequence |
| | | added into hinge |

[0385] FcγR binding was shown to be as expected for each construct, i.e., FcγR binding is driven by lower hinge/CH2 region.

[0386] The results are shown in FIGS. 8A, B and C and in Tables 15 and 16. Data shown in Table 15 were generated using the same protocol described in Example 1B (without washing out the antibodies). Data shown in Table 16 were generated using the same protocol described in Example 1A.

TABLE 15
Ymax and T_{1/2} of antibody mediated CD73
internalization in Calu6 and NCI-292 cells

| | Calu6 | | NCI-H292 | |
|---|---|---|---|---|
| | Ymax | T_{1/2} | Ymax | T_{1/2} |
| | (%) | (hr) | (%) | (hr) |
| mAb-CD73.4-IgG1f/LC- | 55.72 | 0.8452 | 73.05 | 0.5014 |
| 11F11-Vk2 | | | | |
| mAb-CD73.4-IgG2.3G1-AY- | 85.07 | 0.3326 | 90.25 | 0.272 |
| pTT5-SP | | | | |
| mAb-CD73.4-IgG2.3G1-KH | 81.62 | 0.3962 | 91.61 | 0.2801 |
| mAb-CD73.4-G1-G2.3-G1-AY | 72.7 | 0.4229 | 84.51 | 0.3083 |
| mAb-CD73.4-IgG1-deltaTHT | 69.27 | 0.5652 | 83.63 | 0.3441 |
| mAb-CD73.4-G1-G2.3-G1-KH | 65.67 | 0.5674 | 83.29 | 0.343 |
| mAb-CD73.4-IgG2.3-plusTHT | 81.19 | 0.3551 | 91.41 | 0.2935 |
| mAb-CD73.4-IgG2.3- | 81.72 | 0.3355 | 91.6 | 0.2712 |
| plusGGG | | | | |
| mAb-CD73.4-IgG2.5 | 78.98 | 0.3485 | 89.56 | 0.3057 |
| mAb-CD73.4-IgG2.5G1.1f-KH | 79.63 | 0.3527 | 90.86 | 0.2993 |
| mAb-CD73.4-IgG2.5G1-AY | 81.91 | 0.2901 | 91.3 | 0.2452 |
| mAb-CD73.4-IgG2.5G1-KH | 76 | 0.2837 | 90.75 | 0.256 |
| mAb-CD73.4- | 80.15 | 0.2869 | 89.6 | 0.2565 |
| IgG2.5plusTHT/LC | | | | |
| mAb-CD73.4-IgG2-C219S/LC | 82.35 | 0.3725 | 88.91 | 0.2866 |
| mAb-CD73.4-IgG2-C219S/LC | 82.54 | 0.3639 | 87.66 | 0.2845 |
| mAb-CD73.4-IgG1.1f + K/LC | 57.07 | 1.519 | 70.4 | 0.4969 |
| mAb-CD73.4-IgG2CS-IgG1.1f | 80.98 | 0.3508 | 90.35 | 0.2764 |

TABLE 16
Internalization characteristics of CD73.4 with
various constant regions in Calu6 cells

| | Internalization | |
|---|---|---|
| CD73_mAb_Clones | Max | Speed |
| CD73.4-IgG1f/LC-11F11-Vk2 | + | + |
| CD73.4-Vh-hHC-IgG2.3G1-AY-pTT5- | ++++ | ++++ |
| SP5 | | |
| CD73.4-Vh-hHC-IgG2.3G1-KH | ++++ | +++ |
| CD73.4-Vh-hHC-G1-G2.3-G1-AY | ++ | ++ |
| CD73.4-Vh-hHC-G1-G2.3-G1-KH | ++ | ++ |
| CD73.4-Vh-hHC-IgG1-deltaTHT | ++ | +++ |
| CD73.4-Vh-hHC-IgG2.3-plusTHT | ++++ | ++++ |
| CD73.4-Vh-hHC-IgG2.3-plusGGG | ++++ | ++++ |
| CD73.4-Vh-hHC-IgG2.5 | ++++ | ++++ |
| CD73.4-Vh-hHC-IgG2.5G1.1f-KH | ++ | ++++ |
| CD73.4-Vh-hHC-IgG2.5G1-AY | +++ | ++++ |
| CD73.4-Vh-hHC-IgG2.5G1-KH | +++ | ++++ |
| CD73.4-Vh-hHC-IgG2.5plusTHT/LC | ++++ | ++++ |
| CD73.4-Vh-hHC-IgG2-C219S/LC | ++++ | ++++ |
| CD73.4-Vh-hHC-IgG2-C219S/LC | ++++ | ++++ |
| CD73.4-Vh-hHC-IgG1.1f + K/LC | + | + |
| CD73.4-Vh-hCh-IgG2-C219S-IgG1.1f | ++++ | ++++ |

[0387] FIGS. 8A-C and Tables 15 and 16 indicate that antibodies having a hinge and CH1 domain of the IgG2 isotype are most efficient at driving internalization of CD73, whereas the antibodies that have an IgG1 hinge and CH1 domain correspond to the lower curves in the figure, i.e., lower extent of internalization. In addition, antibodies with only the hinge from IgG2 have an increased internalization compared to a human IgG1 hinge. Thus, antibodies having a hinge and CH1 domain of the IgG2 isotype have superior internalization characteristics relative to the antibodies with an IgG1 isotype.

[0388] Thus, anti-CD73 antibody mAb-CD73.4-IgG2CS-IgG1.1f (having an IgG2 hinge with C219S substitution and an IgG2 CH1 domain) induced rapid internalization dependent on cell line tested. The T_{1/2} for internalization ranged from minutes to under an hour. Most cell lines tested had a T_{1/2} under 10 minutes. A nearly complete internalization was induced for some cell lines and most tested had at least a 50% reduction in surface CD73 expression which typically reached maximal levels by 5 hours, much shorter in some cases.

### Example 5: IgG2 CH1 Enhances GITR Ab Induced IL-2 Secretion by CD4+ T Cells

[0389] This Example shows that a CH1 domain of the IgG2 isotype enhances anti-GITR antibody induced T cell activity, relative to the antibody with a CH1 domain of the IgG1 isotype.

[0390] The same modified heavy chain constant regions that were used in Example 4 were linked to the variable regions of the anti-GITR antibody (of Example 2). Donor CD4+ T cells were incubated with OKT3-scFv expressing CHO cells and the various anti-GITR antibodies, and the level of IL-2 secreted was measured. This was conducted as described in Example 2.

[0391] The results, which are shown in FIG. 9, indicate that all anti-GITR antibodies having a CH1 domain of the IgG2 isotype, in addition to a hinge of the IgG2 isotype, are more effective at stimulating IL-2 secretion from CD4+ T cells than thos having an IgG1 hinge and CH1.

[0392] Thus, this Example shows that the presence of an IgG2 hinge and IgG2 CH1 domain in an agonist anti-GITR antibody further enhances the agonist activity of the antibody relative to the same antibody that does not have a hinge and/or a CH1 domain of the IgG2 isotype. An antibody having both a hinge and a CH1 domain of the IgG2 isotype has a stronger agonist effect relative to an antibody having a hinge, but not CH1, of the IgG2 isotype Additionally, an antibody with a CH1 domain from IgG2 has a stronger agonist activity than an antibody with with a CH1 domain from IgG1 isotype. An antibody with a hinge from IgG2 and a CH1 domain from IgG1 has stronger agonist acivity than an antibody with a CH1 and hinge from IgG1 isotype.

### Example 6: Relevance of Certain Amino Acid Residues in IgG2 CH1 and Hinge in Improving Antibody Mediated CD73 Internalization

[0393] Anti-CD73 antibodies (CD73.4) with the heavy chain constant regions shown in Table 17 were prepared and tested as described above in antibody mediated CD73 internalization assays.

TABLE 17
Heavy chain constant regions that were fused to
anti-CD73 variable regions

| | | SEQ ID |
|---|---|---|
| | | NO of |
| | | constant |
| Description | Constructs | region |
| CH1 domain of IgG2, | G2-G1-G1-G1 | 94 |
| with all else IgG1. | | |
| Also, Cys > Ser mutant to | G2.5-G1-G1-G1 | 95 |
| reduce potential disulfide | | |
| heterogeneity: | | |
| CH1 domain of IgG1 | G1-G2.3-G2-G2 | 96 |
| with all else IgG2.3: | | |
| Swap CH1 regions in IgG1 | G1-KRGEGSSNLF | 97 |
| with those of IgG2, either | G1-KRGEGS | 98 |
| separate or together: | G1-SNLF | 99 |
| | IgG1-ITNDRTPR | 100 |
| | G1-SNLFPR | 101 |
| Swap CH1 regions in IgG2 | G2-RKEGSGNSFL | 102 |
| with those of IgG1, either | G2-RKEGSG | 103 |
| separate or together: | G2-NSFL | 104 |
| | IgG2-TIDNTRRP | 105 |
| | G2-NSFLRP | 106 |
| IgG1 with CH2 domain | G1-G1-G2-G1-AY | 107 |
| residues of IgG2: | G1-G1-G2-G1-KH | 108 |
| IgG2 with CH2 domain | G2-G2.3-G1-G2-KH | 109 |
| residues of IgG1: | G2.5-G2.3-G1-G2-KH | 110 |
| | G2-G2.3-G1-G2-AY | 111 |
| | G2.5-G2.3-G1-G2-AY | 112 |
| Swap hinge regions between | G1-G2.3-G1-G1-KH | 113 |
| IgG1 and IgG2: | G2-G1-G2-G2-AY | 114 |
| | G2.5-G1-G2-G2-AY | 115 |
| | G1-G2-G1-G1-AY | 116 |
| | G2-G1-G2-G2-KH | 117 |
| | G2.5-G1-G2-G2-KH | 118 |
| Hinge truncations | IgG1-deltaHinge | 119 |
| | IgG2-deltaHinge | 120 |
| | IgG2.5-deltaHinge | 121 |
| | IgG1-deltaG237 | 122 |
| | IgG2-plusG237 | 123 |
| Other | IgG2.4 | 124 |
| | IgG2.3/4 | 125 |

### EQUIVALENTS

[0394] The results, which are shown in FIG. 10, provide the following information in the context of CD73 internalization:
[0395] CH2 domain does not appear to have an impact as shown by
   [0396] a) very little difference in internalization ability was observed between the antibodies comprising a modified heavy chain constant region with format “AY” (having the IgG2 hinge ERKCCVECPPCPAPPVAG (SEQ ID NO: 8) relative to those with format “KH” (ERKCCVECPPCPAPELLGG (SEQ ID NO: 22) (Set 5, 6 and 7);
   [0397] b) CH2 swaps are comparable to wiltype G1 or G2 (Sets 5 and 6); and
   [0398] c) residue 237 has no impact on internalization: neither the addition of a “G” residue to an IgG2 hinge nor the deletion of the C terminal “G” in an IgG1 hinge affected internalization (Set 9).
[0399] This suggests that the CH2 domain does not impact internalization (i.e., the CH2 domain can be from IgG1 or IgG2);
[0400] Swapping the CH1 regions indicated in Set 3 (KRGEGSSNLF; KRGEGS; SNLF; ITNDRTPR and SNLFPR) in IgG1 with those of IgG2 provides little benefit, i.e., the internalization remains similar to that of IgG1; see Set 3);
[0401] Swapping the CH1 regions indicated in Set 4 (RKEGSGNSFL; RKEGSG; NSFL; TIDNTRRP and NSFLRP) in IgG2 with those of IgG1 has variable impact: changing NSFL has no impact, whereas the other 2 regions (RKEGSG & RP) are involved (see Set 4). Based on the results of Sets 3 and 4, it appears that there is an interaction between the CH1 region and the hinge, with RKEGSG and RP regions being more important than NSFL region;
[0402] The hinge region impacts internalization, i.e., the hinge of IgG2 provides better internalization relative to the hinge of IgG1 (see Sets 7 and 8). In addition, IgG1 with a deletion (G1-delta-hinge) improves internalization over IgG1. IgG2 with a deletion (G2-delta-hinge) provides a similar level of internalization relative to that of an IgG2 hinge. This suggests that the hinge region impacts internalization, which effect is enhanced by an IgG2 CH1 (G2-G1-G2-G2-AY is comparable to G1-G2-G1-G1-AY);
[0403] IgG2.4 (C220S) has similar or reduced internalization compared to IgG2.3 (C219S). IgG2.3/4 (C219S/C220S) has much reduced internalization compared to IgG2.3 or IgG2.4 alone (see Set 10). This suggests that internalization of an antibody with an IgG2 hinge and C219S is about the same as that of an IgG2 hinge with C220S, both of which are much better than that of an IgG2 hinge with both C219S and C220S;
[0404] IgG2.5 (C131S mutation) has reduced internalization compared to constructs with C131 (see Sets 1, 6 and 7).
[0405] Thus, these results indicate that the CH1 domain and the hinge are both relevant in the antibody mediated CD73 internalization, and that an antibody having the IgG2 sequences from these domains is internalized with better efficacy relative to an antibody having these regions from IgG1.

### Example 7: Antibodies Having an IgG2 Hinge and/or CH1 Domain Form High Molecular Weight Complexes

[0406] CD73.4 antibodies having the heavy chain constant regions set forth in Table 14 were also tested for formation of high molecular weight complexes by SEC-MALS and DLS experiments, as described in Example 3.

[0407] Three out of the 16 antibodies in this study were were previously tested: CD73.4-IgG1.1f, CD73.4-IgG2-C219S (also called CD73.4-IgG2.3), and CD73.4-IgG2-C219S-IgG1.1f (also called CD73.4-IgG2.3G1.1f-KH). SEC-MALS and DLS data of the antibodies alone showed retention times, masses, and hydrodynamic radii for each antibody that are typical for a monomeric monoclonal antibody. Equimolar complexes of each antibody (5.5 uM) with hCD73-his (5.5 uM) showed slower retention times for all complexes as compared to antibody or hCD73-his alone indicating the formation of complexes. An overlay of the SEC chromatogram data for each of the 16 complexes is shown in FIG. 11A. The chromatogram data can be divided into 4 distinct peaks, which are shown in FIG. 11B. Peak 1 contains the largest species, with MALS-determined masses suggesting complexes with mass equivalent of greater than 4:4 hCD73-his:mAb complexes. Peak 2 contains species with MALS-determined masses suggesting complexes of about 2:2 hCD73-his:mAb complexes. Peak 3 is a minor species with low signal and MALS-determined masses suggesting about 1:1 hCD73-his:mAb complexes. Peak 4 corresponds to the elution of the mAbs alone with MALS-determined masses consistent with free antibody. To quantitate the relative amounts of each species, the 4 peaks of each chromatogram were integrated as peak 1 (<12.9 min), peak 2 (12.9-15.1 min), peak 3 (15.1-16.7 min), peak 4 (16.7-19.3 min). The integration also included an additional integrated range called peak 5 (>19.3 min) to account for any low molecular weight species, which were found to be negligible (<3.5% for all complexes). The percentage of each species from this integration is summarized in Table 18. All complexes contained a similar small percentage of peak 3 (about 6-9%), but variable amounts of the other peaks. Most notable is that all complexes between hCD73-his and antibodies containing a CH1 domain from hIgG1 had a significantly greater percentage of smaller complexes (peak 2), whereas those containing CH1 domain from hIgG2 had a greater percentage of larger complexes (peak 1) (Table 18 and FIG. 11C). This suggests an important role for not only the hinge region but also the CH1 domain in higher order complex formation.

TABLE 18
Retention times of CD73.4 antibodies with modified
heavy chain constant regions

| | UV % | | | | |
|---|---|---|---|---|---|
| | | Peak2 | Peak3 | Peak4 | |
| | Peak1 | 12.9- | 15.1- | 16.7- | Peak5 |
| Complexes | <12.9 min | 15.1 min | 16.7 min | 19.3 min | >19.3 min |
| CD73.4-IgG2.3 + hCD73-his | 37.0 | 23.8 | 7.7 | 28.6 | 2.9 |
| CD73.4-IgG2.3G1.1f-KH + hCD73-his | 36.0 | 23.8 | 7.9 | 29.3 | 3.0 |
| CD73.4-IgG1.1f + hCD73-his | 28.4 | 36.2 | 7.4 | 25.6 | 2.3 |
| CD73.4-IgG1f + hCD73-his | 26.0 | 36.5 | 7.5 | 27.8 | 2.2 |
| CD73.4-IgG2.3G1-AY + hCD73-his | 30.2 | 24.3 | 8.1 | 34.4 | 3.0 |
| CD73.4-IgG2.3G1-KH + hCD73-his | 34.9 | 23.4 | 7.9 | 30.7 | 3.0 |
| CD73.4-IgG1-G2.3G1-AY + hCD73-his | 14.6 | 29.2 | 6.4 | 48.3 | 1.6 |
| CD73.4-IgG1-G2.3G1-KH + hCD73-his | 23.8 | 32.6 | 7.0 | 34.5 | 2.1 |
| CD73.4-IgG1-deltaTHT + hCD73-his | 28.3 | 35.4 | 7.0 | 26.9 | 2.4 |
| CD73.4-IgG2.3-plusTHT + hCD73-his | 30.6 | 24.3 | 8.3 | 33.7 | 3.2 |
| CD73.4-IgG2.3-plusGGG + hCD73-his | 30.0 | 23.9 | 8.2 | 34.9 | 2.9 |
| CD73.4-IgG2.5 + hCD73-his | 31.7 | 24.4 | 8.4 | 32.5 | 3.1 |
| CD73.4-IgG2.5G1.1f-KH + hCD73-his | 30.7 | 24.3 | 8.9 | 32.7 | 3.4 |
| CD73.4-IgG2.5G1-AY + hCD73-his | 26.3 | 24.8 | 8.1 | 38.3 | 2.6 |
| CD73.4-IgG2.5G1-KH + hCD73-his | 21.4 | 24.1 | 7.0 | 45.6 | 1.9 |
| CD73.4-IgG2.5-plusTHT + hCD73-his | 32.6 | 23.5 | 8.3 | 32.6 | 3.0 |

### Example 8: Fc Receptor Binding for Antibodies with Engineered Constant Domains

[0408] This Example demonstrates that antibodies having modified heavy chain constant regions comprising the CH1 and hinge of IgG2 bind to FcγRs when they contain CH2 and CH3 domains of IgG1.

[0409] In addition to antigen binding by the variable domains, antibodies can engage Fc-gamma receptors (FcgRs) through interaction with the constant domains. These interactions mediate effector functions such as antibody-dependent cellular cytotoxicity (ADCC) and antibody-dependent cellular phagocytosis (ADCP). Effector function activity is high for the IgG1 isotype, but very low or absent for IgG2 and IgG4 due to these isotypes having lower affinity for FcgRs. In addition, the effector function of IgG1 can be modified through mutation of amino acid residues within the constant regions to alter FcgR affinity and selectivity.

[0410] The binding of antibodies to Fc gamma receptors (FcγRs or FcgRs) was studied using biosensor technologies including Biacore surface plasmon resonance (SPR) and Fortebio Biolayer Interferometry (BLI). SPR studies were performed on a Biacore T100 instrument (GE Healthcare) at 25° C. The Fab fragment from a murine anti-6×His antibody was immobilized on a CM5 sensor chip using EDC/NHS to a density of ˜3000 RU. Various his-tagged FcgRs (7 ug/ml) were captured via the C-terminal his-tag using a contact time of 30 s at 10 ul/min, and the binding of 1.0 uM antibody was evaluated in a running buffer of 10 mM NaPO4, 130 mM NaCl, 0.05% p20 (PBS-T) pH 7.1. FcgRs used for these experiments included CD64 (FcgRI), CD32a-H131 (FcgRIIa-H131), CD32a-R131 (FcgRIIa-R131), CD32b (FcgRIIb), CD16a-V158 (FcgRIIIa-V158), CD16b-NA1 (FcgRIIIb-NA1), and CD16B-NA2 (FcgRIIIb-NA2). BLI experiments were performed on a Fortebio Octet RED instrument (Pall, Fortebio) at 25° C. in 10 mM NaPO4, 130 mM NaCl, 0.05% p20 (PBS-T) pH 7.1. Antibodies were captured out of undiluted expression supernatants on protein A coated sensors, followed by the binding of 1 uM hCD32a-H131, hCD32a-R131, hCD32b, hCD16a-V158, or 0.1 uM hCD64 analytes.

[0411] First, antibodies binding to various targets were made that contain modified IgG1 Fc domains including the substitutions S267E (SE) and S267E/L328F (SELF), as well as various combinations of the mutations P238D, P271G, H268D, A330R, G237D, E233D, referred to as V4, V7, V8, V9 and V12. The binding of these antibodies was studied by Biacore SPR with comparison to IgG1f, IgG2.3 (IgG2-C219S) and IgG4.1 (IgG4-S228P) antibodies, as well as an IgG1.1f antibody which has been engineered to reduce binding to all FcgRs. The results, which are shown in FIG. 12, demonstrate the expected FcgR binding properties for IgG1f, IgG2.3 and IgG4.1 and the mutated IgG1 antibodies, including increased CD32a-H131, CD32a-R131 and CD32b binding for SE and SELF, as well as increased selectivity of the V4, V7, V8, V9 and V12 mutants for CD32b over CD32a-H131 and CD32a-R131, FIG. 12.

[0412] The next set of constructs were used to engineer effector function into the otherwise effector function negative IgG2 isotype. For this study, the mutations described above were introduced in the context of IgG2.3 constant region, or an IgG2.3/IgG1f hybrid termed IgG2.3G1-AY, Table 19. Antibodies were expressed at small scale as supernatants, and tested for binding to FcgRs using Fortebio Octet BioLayer Interferometry biosensor technology. Since the antibodies were present at low concentration in the supernatants, the experiment was performed by capturing antibodies out of the supernatants using protein A coated sensors, followed by binding of FcgR analytes in solution. Purified and supernatant control IgG1f including wild type IgG1, SE, P238D, V4 and V12 antibodies were also included for comparison, and each of these control antibodies demonstrated expected FcgR binding properties, FIG. 13. The IgG2.3 antibody also demonstrated the expected binding profile, with appreciable binding to only CD32a-H131. However, all mutations to introduce S267E, L328F, P238D, P271G, H268D, A330R, G237D, or E233D mutations into IgG2.3 failed to recapitulate the FcgR affinity of the corresponding engineered IgG1 mAbs, FIG. 13. In contrast, the IgG2.3G1-AY construct was able to fully preserve the FcgR binding properties of wild type IgG1, while retaining the CH1 and hinge regions of IgG2.3. In addition, all IgG2.3G1-AY mutants containing S267E, L328F, P238D, P271G, H268D, A330R, G237D, and E233D demonstrated FcgR binding properties comparable to the IgG1 version mAbs containing the same mutations, FIG. 13. This demonstrates the successful engineering of antibodies with CH1 and hinge regions of IgG2 combined with effector function of wild type or mutant IgG1.

TABLE 19
Engineered IgG2 constructs

| | | | Seq |
|---|---|---|---|
| Set | ID | Construct | ID # |
| 1 | IgG2.3 | hHC-IgG2-C219S | |
| | IgG2.3-V13 | hHC-IgG2-C219S − P238D | |
| | IgG2.3-V14 | hHC-IgG2-C219S − P238D, P271G | |
| | IgG2.3-V15 | hHC-IgG2-C219S − P238D, H268D, | |
| | | P271G | |
| | IgG2.3-V16 | hHC-IgG2-C219S − P238D, P271G, | |
| | | A330R | |
| | IgG2.3-V17 | hHC-IgG2-C219S − P238D, H268D, | |
| | | P271G, A330R | |
| | IgG2.3-V18 | hHC-IgG2-C219S − S267E | |
| | IgG2.3-V19 | hHC-IgG2-C219S − S267E, L328F | |
| 2 | IgG2.3G1 | hHC-IgG2-C219S/hHC-IgG1f | |
| | IgG2.3G1- | hHC-IgG2-C219S/hHC-IgG1f − | |
| | AY-V20 | P238D | |
| | IgG2.3G1- | hHC-IgG2-C219S/hHC-IgG1f − | |
| | AY-V21 | P238D, P271G | |
| | IgG2.3G1- | hHC-IgG2-C219S/hHC-IgG1f − | |
| | AY-V22 | P238D, H268D, P271G | |
| | IgG2.3G1- | hHC-IgG2-C219S/hHC-IgG1f − | |
| | AY-V23 | P238D, P271G, A330R | |
| | IgG2.3G1- | hHC-IgG2-C219S/hHC-IgG1f − | |
| | AY-V24 | P238D, H268D, P271G, A330R | |
| | IgG2.3G1- | hHC-IgG2-C219S/hHC-IgG1f − | |
| | AY-V25 | G237D, P238D, H268D, P271G, | |
| | | A330R | |
| | IgG2.3G1- | hHC-IgG2-C219S/hHC-IgG1f − | |
| | AY-V26 | E233D, G237D, P238D, H268D, | |
| | | P271G, A330R | |
| | IgG2.3G1- | hHC-IgG2-C219S/hHC-IgG1f − | |
| | AY-V27 | S267E | |
| | IgG2.3G1- | hHC-IgG2-C219S/hHC-IgG1f − | |
| | AY-V28 | S267E, L328F | |

[0413] This engineering strategy was further explored by producing other antibodies formatted with IgG2.3G1-AY, IgG2.3G1-AY-S267E (IgG2.3G1-AY-V27), as well as IgG2-B-form variants (IgG2.5G1-AY and IgG2.5G1-AY-V27), and other hybrid antibodies containing different combinations of IgG1 and IgG2 constant domains, and testing the binding of these antibodies to anti-his Fab captured his-tagged FcgRs using Biacore SPR technology. In agreement with the Octet supernatant data, the SPR data showed that the IgG2.3G1-AY and IgG2.3G1-AY-V27 antibodies had comparable FcgR binding properties to IgG1f and IgG1f-S267E respectively, despite containing the CH1 and hinge regions of an A-form IgG2 antibody (IgG2.3) (FIGS. 14A and B and Table 20). Similar data was also obtained using IgG2.5G1-AY and IgG2.5G1-AY-V27 antibodies, demonstrating the successful engineering of B-form IgG2 antibodies (containing C131S mutation termed IgG2.5) having IgG1f or modified IgG1f like effector functions. Data for several other antibodies with IgG2.3G1-AY, IgG2.3G1-AY-V27, IgG2.5G1-AY, or IgG2.5G1-AY-V27 constant regions but different variable regions shows that this engineering strategy is broadly applicable to other antibodies independent of the variable domains (FIGS. 14A and B and Table 20). Other constructs that demonstrate IgG1f-like FcgR binding properties are IgG1-G2.3G1-AY, and IgG1deltaTHT, whereas several of the modified constant region constructs were unable to retain IgG1f-like FcgR binding properties, including IgG2.3G1-KH, IgG2.5G1-KH, IgG2.3plusTHT, IgG2.5plusTHT and IgG2.3plusGGG constructs, (FIGS. 14A and B and Table 20).

TABLE 20
% Rmax values for 1 uM antibodies binding to
anti-his Fab captured FcgR-his proteins

| | | hCD32a- | hCD32a- | | hCD16a- | hCD16B- |
|---|---|---|---|---|---|---|
| mAb | hCD64 | H131 | R131 | hCD32b | V158 | NA2 |
| mAb8-IgG1f | 80% | 82% | 51% | 27% | 51% | 21% |
| mAb9-IgG1f | 70% | 33% | 19% | 4% | 28% | 10% |
| CD73.4-IgG1f | 65% | 46% | 26% | 6% | 43% | 17% |
| GITR.6-IgG1f | 66% | 35% | 25% | 8% | 41% | 19% |
| CD73.4-IgG1.1f | 2% | 0% | 2% | 1% | 0% | 0% |
| GITR.6-IgG1.1f | 2% | 0% | 3% | 1% | 0% | 0% |
| mAb11-IgG2.3 | 2% | 44% | 17% | 5% | 1% | 0% |
| CD73.4-IgG2.3 | 3% | 48% | 11% | 1% | 1% | 0% |
| mAb6-IgG2.3 | 3% | 66% | 14% | 3% | 1% | 0% |
| GITR.6-IgG2.3 | 4% | 40% | 10% | 1% | 2% | 0% |
| mAb4-IgG2.3 | 1% | 39% | 6% | 1% | 1% | 0% |
| mAb5-IgG2.3 | 6% | 100% | 30% | 4% | 3% | 0% |
| mAb12-IgG2.3 | 2% | 39% | 7% | 1% | 1% | 0% |
| mAb13-IgG2.3 | 2% | 40% | 7% | 1% | 1% | 0% |
| mAb11-IgG2.5 | 0% | 40% | 13% | 3% | 0% | −1% |
| mAb7-IgG2.5 | 4% | 72% | 19% | 2% | 2% | 0% |
| mAb8-IgG2.5 | 3% | 59% | 14% | 3% | 2% | 0% |
| mAb10-IgG2.5 | 1% | 29% | 5% | 1% | 1% | 0% |
| CD73.4-IgG2.5 | 3% | 40% | 7% | 1% | 1% | 0% |
| mAb6-IgG2.5 | 3% | 75% | 17% | 4% | 2% | 0% |
| GITR.6-IgG2.5 | 4% | 43% | 13% | 2% | 2% | 1% |
| mAb4-IgG2.5 | 2% | 46% | 8% | 1% | 1% | 0% |
| mAb5-IgG2.5 | 6% | 89% | 26% | 5% | 4% | 1% |
| mAb12-IgG2.5 | 1% | 36% | 6% | 1% | 1% | 0% |
| mAb13-IgG2.5 | −2% | 39% | 4% | −2% | 0% | −2% |
| mAb8-IgG2.3G1-AY | 77% | 61% | 38% | 10% | 38% | 13% |
| mAb10-IgG2.3G1-AY | 67% | 23% | 14% | 4% | 24% | 8% |
| CD73.4-IgG2.3G1-AY | 65% | 38% | 20% | 5% | 38% | 14% |
| GITR.6-IgG2.3G1-AY | 66% | 43% | 33% | 16% | 42% | 21% |
| mAb7-IgG2.5G1-AY | 80% | 73% | 45% | 12% | 47% | 19% |
| mAb8-IgG2.5G1-AY | 77% | 70% | 45% | 17% | 48% | 22% |
| CD73.4-IgG2.5G1-AY | 65% | 43% | 24% | 7% | 40% | 16% |
| GITR.6-IgG2.5G1-AY | 65% | 38% | 27% | 10% | 41% | 19% |
| CD73.4-IgG2.3G1-KH | 2% | 15% | 2% | 0% | 2% | 0% |
| GITR.6-IgG2.3G1-KH | 3% | 13% | 3% | 0% | 3% | 1% |
| CD73.4-IgG2.5G1-KH | 2% | 17% | 2% | 0% | 3% | 0% |
| GITR.6-IgG2.5G1-KH | 2% | 15% | 3% | 0% | 3% | 1% |
| CD73.4-IgG2.3G1.1f-KH | 1% | 10% | 1% | 0% | 1% | 0% |
| GITR.6-IgG2.3G1.1f-KH | 2% | 9% | 2% | 0% | 1% | 0% |
| CD73.4-IgG2.5G1.1f-KH | 1% | 6% | 1% | 0% | 1% | 0% |
| GITR.6-IgG2.5G1.1f-KH | 3% | 15% | 4% | 0% | 2% | 0% |
| mAb7-IgG2.3G1-AY-V27 | 84% | 68% | 92% | 76% | 26% | 7% |
| mAb8-IgG2.3G1-AY-V27 | 78% | 67% | 80% | 67% | 24% | 7% |
| mAb10-IgG2.3G1-AY-V27 | 69% | 24% | 57% | 40% | 12% | 3% |
| mAb7-IgG2.5G1-AY-V27 | 81% | 74% | 89% | 84% | 32% | 9% |
| mAb8-IgG2.5G1-AY-V27 | 77% | 76% | 79% | 77% | 33% | 10% |
| CD73.4-IgG1-G2.3G1-AY | 66% | 50% | 31% | 10% | 48% | 23% |
| GITR.6-IgG1-G2.3G1-AY | 66% | 36% | 25% | 7% | 42% | 19% |
| CD73.4-IgG1-G2.3G1-KH | 2% | 18% | 2% | 0% | 4% | 1% |
| GITR.6-IgG1-G2.3G1-KH | 2% | 21% | 2% | 0% | 5% | 1% |
| CD73.4-IgG1deltaTHT | 65% | 43% | 23% | 6% | 42% | 17% |
| GITR.6-IgG1deltaTHT | 66% | 57% | 42% | 17% | 48% | 27% |
| CD73.4-IgG2.3plusTHT | 3% | 42% | 8% | 1% | 1% | 0% |
| GITR.6-IgG2.3plusTHT | 6% | 45% | 17% | 2% | 3% | 1% |
| CD73.4-IgG2.5plusTHT | 2% | 34% | 7% | 1% | 1% | 0% |
| GITR.6-IgG2.5plusTHT | 5% | 44% | 15% | 2% | 3% | 1% |
| CD73.4-IgG2.3plusGGG | 3% | 43% | 8% | 1% | 1% | 0% |
| GITR.6-IgG2.3plusGGG | 6% | 45% | 17% | 2% | 3% | 1% |

Taken together these data show that the sequence immediately C-terminal to the conserved CPPCPAP motif in the hinge region confers FcgR-mediated effector function, whereas the CH1 and upper portions of the hinge of the antibody can be replaced with IgG2 or modified IgG2 sequences, to potentially combine the effector functions of IgG1 and modified IgG1 with the superior internalization or signaling properties of antibodies containing IgG2 CH1 and/or hinge regions.

### Example 9: GITR Agonist Ab Internalization is Enhanced in Antibodies Having an IgG2 Hinge and CH1 Domain

[0414] To induce GITR expression, cells were incubated for 72h at 37° C. with 20 ng/ml anti-CD3+1000 ng/ml CD28. As an alternate method of T-cell activation, large batches of activated CD4⁺ T-cells were prepared by a three stage culture protocol. Briefly, CD4⁺ T-cells were stimulated with plate bound CD3 (1.5 ug/ml) supplemented with 1 ug/ml soluble CD28 for 72h at 37° C., expanded in culture for 14 days in the presence of 20 u/ml IL2 and finally exposed to another round of activation by addition of 10 ug/ml PHA, 2u/ml IL2 and 1 ug/ml CD28 for 72h at 37° C. Stimulated T cells were seeded into 384 well PDL imaging plates for 2h to adhere the cells, cooled for 15 min at 4° C., and then alexa 488 labeled GITR antibodies were added separately for 1h. Plates were finally imaged by HCS and the data were reported as total intensity per cell.

[0415] Three different GITR antibodies have been evaluated using the above mentioned T cell activation methods. They are GITR.6 antibody as a G1 isotype and an inert (IgG1.1) isotype unable to bind to Fc receptors, as well as a chimera with the IgG2 hinge in place of the IgG1 hinge.

[0416] GITR antibody induced internalization was assessed in CD3 stimulated CD4+ T-cells using the alexa quench assay format. Freshly obtained CD4 positive T cells were incubated under as described above to induce GITR expression. After stimulation, cells were resuspended into fresh media and plated for internalization assays as follows. Cells were incubated with antibody as described above, washed with warm media and incubated at 37° C. for the indicated times prior to fixation and quenching. Internalized antibody was measured as increased fluorescence above the small unquenchable signal observed at time zero and then normalized against the total fluorescence “unquenched control” initially bound to the cells. As shown in FIG. 15, GITR ligation resulted in rapid internalization peaking between 30-60 minutes for each antibody tested while control antibodies were found to maintain localization to the plasma membrane. The results indicate that the IgG2 hinge region enhances GITR ligation induced internalization.

[0417] To further dissect the detailed mechanisms of internalization and associated dynamics, antibody endocytosis and delivery into early endosome compartments was analyzed. In this experiment, cells were subjected to pulse chase analysis with unlabeled antibodies. Upon fixation, cells were permeabilized and stained for the early endosome marker EEA1 (cell signaling technology), washed and then detected with alexa fluor-488 conjugated anti-rabbit secondary antibody (EEA1) and alexa fluor-647 conjugated anti-human antibody (GITR). Plates were imaged on an Opera confocal system with a 60X water immersion objective. The results indicated clear segregation between the membrane bound anti-GITR antibody staining and intracellular EEA1 signal. Upon warming the cultures, clustering for some antibodies was detected that appears to co-localize with endosomal proteins. Quantification of endosomal co-localization was performed using HCS Studio Software and the results are plotted as the ratio of colocalized pixel intensity relative to total staining (FIG. 16). The colocalization of GITR antibody and early endosome is most prominent at 30 minutes. At this tested time point, GITR.6.G2.G1f showed a higher fraction colocalized than the GITR.6.G1f antibody. The colocalization results correlate with the observations made using the alexa quenching method described above and support a model suggesting the G2 hinge has potential advantage over G1 for inducing GITR internalization.

### Example 10: GITR Agonist Ab Signaling in T Cell Receptor Activated CD4+ and CD8+ T Cells is Enhanced in Antibodies Having an IgG2 Hinge and CH1 Domain

[0418] To further investigate the mechanisms for anti-GITR agonist antibodies, several signaling pathways involved in T cell activation, such as NFkB and P38 signaling pathways, were monitored.

[0419] CD4+ and CD8+ T cells from a healthy donor (M6576) were activated with plate-coated 0.4 μg/ml anti-CD3 and 0.4 μg/ml anti-CD28. After 3 days, cells were collected and plated onto 384-well image plates for signaling activation. After cells settled in the plate for 2 hours, they were treated with GITR antibodies for 15 minutes and the signaling events were terminated by adding formaldehyde to a final of 10% into the assays plate. Then the cells were permeabilized and stained with phosphor-p65 NFKB antibody for signaling detection. As shown in FIG. 17, GITR.6.G2 and GITR.6.G2.G1f antibodies had higher signaling responses compared to the GITR.6.G1f in both CD4+ and CD8+ T cells. Although there is no direct evidence of linking internalization and signaling pathway activation, it is intriguing to note that G2 isotype seems to improve both aspects of antibody functional activities compared to the IgG1 for GITR.6.

[0420] To quantify the signaling activities for each antibody, both EC50 and Emax for each antibody were calculated, since both parameters are critical to capture the full extent of the signaling event. The response level of GITR.6.G2.G1f is chosen to be the 100% control, and all other antibodies were normalized against it. As shown in Table 21 for both CD4+ and CD8+ T cell populations activated by anti-CD3 and anti-CD28 antibodies, there were a range of activities for GITR antibodies in terms of both potency (EC50s) and efficacy (Emax %). Although GITR.6.G2, GITR.6.G2.G1f and GITR.6.G1f showed similar potencies (EC50s) around 10 nM range, the efficacy (Emax) was quite different for different isotypes, suggesting G1 antibody does not signal as effectively as the G2 or chimeric isotypes.

TABLE 21
Summary of the GITR HuMab NFKB Signaling
activities in TCR Activated CD4+ and CD8+ T Cells

| | CD4+ T cells | | CD8+ T cells | |
|---|---|---|---|---|
| | EC50 | Emax | EC50 | Emax |
| Antibody | (nM) | (%) | (nM) | (%) |
| GITR.6.G2 | 12.8 | 69 | 9.00 | 85 |
| GITR.6.G2.Gif | 9.00 | 100 | 3.77 | 92 |
| GITR.6.G1f | 7.3 | 10.8 | 20.05 | 27 |
| hIgG1 Isotype | Inactive | 4 | Inactive | 6 |
| Control | | | | |

[0421] To further confirm if the signaling difference of GITR.6.G2 and GITR.6.G2.G1f compared to GITR.6.G1f is limited to NFkB signaling only or if it holds true for other signaling events as well, a P38MAPK signaling readout was explored. As shown in FIG. 18, GITR.6.G2 and GITR.6.G2.G1f antibodies had higher signaling responses compared to the GITR.6.G1f antibody in a CD4+ cell p38 MAPK activation assay. Therefore the better signaling activities for GITR.6 G2 isotype compared with G1 isotype is not only limited to NFkB signaling.

[0422] In addition to enhanced agonist activity and internalization, it was also shown that modified heavy chain constant regions can impart enhanced ADCC (to, e.g., an agonist of a stimulatory receptor), as well as provide a new activity to an antibody. For example, it was found that changing the constant heavy chain domain of an antibody that binds to an inhibitory cell surface molecule and prevents the inhibitory activity of the cell surface molecule (an antagonist) to a modified heavy chain constant region described herein, resulted in the antibody losing its ability to be an antagonist, and instead endowed it with agonist activity (of the inhibitory activity).

### Example 11: Confirmation of Disulfide Bonds of IgG2.3 and IgG2.5 Constructs

[0423] The disulfide bond structures in an antibody comprising the constant domain IgG2.3 (A form), IgG2.3G1 (A form) and IgG2.5 (B-form) were confirmed to be correct by comparison of non-reduced to reduced Lys-C digests.

[0424] The antibody samples were digested with Lys-C which specifically cleaves peptide bonds on the carboxyl-terminal side of Lysine (K, Lys) residues. Peptides in the digest were separated using a Waters ACQUITY BEH C18 column, 1.7 μm, 2.1×150 mm, reverse phase HPLC column and detected with an ultraviolet (UV) detector at 214 nm and Thermo LTQ mass spectrometer.

[0425] Lys-C enzymatic digestion and reduction of disulfide bonds: To a vial containing 100 μg of the antibody sample, 120 μL denature buffer was added, resulting in a 3.7M GuHCl, 0.2M Tris pH 7.0 solution. The mixture was incubated at 55° C. for 30 minutes. Alkylation of protein was done by adding 1 μl 50 mM Iodoacetamide in the above solution, then incubation in the dark at room temperature for 30 minutes. Alkylated sample was diluted with 80 μL dH2O and Waco Lys-C was added at enzyme to substrate ratio as 1:10. The antibodies were digested overnight in the dark at room temperature. After digestion, a 100 μL aliquot was removed from the Lys-C digested sample and 10 μL of 0.5M DTT was added in. This sample was incubated at room temperature for 1 hour to reduce the disulfide bonds.

[0426] The results obtained are as follows:

[0427] Disulfide structure of the IgG2.3 and IgG2.3G1 antibodies (A form): Within the Fab region of the heavy chain Cys22 (H) is linked to Cys98 (H) and Cys151 (H) is linked to Cys 207(H). Within the Fc region of the heavy chain Cys265(H) is linked to Cys325 (H) and Cys371 (H) is linked to Cys429 (H). Within the Fab region of the light chain Cys23 (L) is linked to Cys88 (L) and Cys134 (L) is linked to Cys194 (L). The C-terminal of light chain Cys214 (L) is linked to the heavy chain at Cys138 (H). The hinge region of the heavy chain contains three cysteine residues Cys227 (H), Cys230 (H) and Cys233 (H), which provide three inter-chain disulfide bonds. The most likely linkage is Cys227 (H) to Cys227 (H), Cys230 (H) to Cys230 (H) and Cys233 (H) to Cys233 (H) which is the correct theoretical disulfide arrangement of IgG2 A form.

[0428] Disulfide structure of the IgG2.5 antibody (B form): Within the Fab region of the heavy chain Cys22 (H) is linked to Cys98 (H) and Cys151 (H) is linked to Cys 207(H). Within the Fc region of the heavy chain Cys264(H) is linked to Cys324 (H) and Cys370 (H) is linked to Cys428 (H). Within the Fab region of the light chain Cys23 (L) is linked to Cys88 (L) and Cys134 (L) is linked to Cys194 (L). The hinge region of the heavy chain contains four cysteine residues Cys226(H), Cys227 (H), Cys230 (H) and Cys233 (H). The C-terminal of light chain Cys214 (L) is linked to a cysteine residue of heavy chain in the hinge region, and rest three cysteine residues provide three inter-chain disulfide bonds. The most likely linkage is Cys214 (L) to Cys226 (H), then Cys227 (H) to Cys227 (H), Cys230 (H) to Cys230 (H) and Cys233 (H) to Cys233 (H), which is the correct theoretical disulfide arrangement of IgG2 B form. Additionally, the disulfide linkages in the hinge region were confirmed using electron transfer dissociation (ETD) triggered tandem mass spectrometry using an ion trap mass spectrometer.

### Example 12: Relevance of Certain Amino Acid Residues in IgG2 CH1 and Hinge in Improving GITR Agonism on T Cells

[0429] Anti-GITR antibodies (GITR.6) with the heavy chain constant regions shown in Table 17 were prepared and tested in IL-2 production assays as described in Example 2, but in which supernatants were harvested at 40 hours rather than 48 hours.

[0430] The results, which are shown in FIG. 20A-D, were largely in agreement with the CD73 internalization results (see FIG. 10) obtained with anti-CD73 antibodies having the same heavy chain constant regions as those used in this Example.

### Example 13: Elimination of Effector Functions with a P238K Mutation

[0431] Variable regions of an antibody were fused to an IgG1 Fc that differs from a wild type IgG1 Fc in a single amino acid residue: P238K (SEQ ID NO: 198). With this single mutation, the antibody demonstrated a lack of effector function, having essentially no detectable binding signal towards the low affinity Fc√Rs hCD32a-H131, hCD32a-R131, hCD32b, hCD16a-V158 or hCD16b-NA2 (see data in Example 14). In addition, the antibody with IgG1 P238K showed significant reduction in binding affinity to the high affinity Fc√R CD64 (see data in Example 14). Binding of the antibody to CD64 demonstrated a faster off-rate (dissociation constant) relative to antibodies with a wild type IgG1 constant domain.

[0432] The lack of effector function of an IgG1 Fc having a P238K mutation (SEQ ID NO: 198) was also demonstrated with an antibody variant.

[0433] Thus, a human IgG1 Fc with a single mutation (P238K), e.g., wherein the heavy chain constant region comprises the amino acid sequence SEQ ID NO: 198, can be used in any antibodies in which the effector functions are not desirable.

### Example 14: Elimination of Effector Functions with a P238K and Additional Mutations

[0434] Additional antibodies were generated with Fcs having mutation(s) to further reduce effector function, preferably both ADCC and CDC. Mutants were generated to further reduce FcR binding as shown in Table 22. In particular, as shown above, P238K eliminates detectable FcR binding except to CD64, so the goal was to combine P238K with additional mutations to reduce CD64 binding. Mutations were tested in the context of IgG1 isotype, IgG2.3 and IgG2.5 isotype and IgG2.3G1 isotype formats. The Fcs used in these antibodies comprise one of the amino acid sequences having SEQ ID NOs: 234-245 and 247-262.

[0435] The location of the mutations is shown in FIG. 21.

[0436] The binding of human FcγRs to antibodies was studied by surface plasmon resonance using a Biacore 8K system (GE Healthcare). For these studies, protein A was immobilized on flow cells 1-4 of the CM5 sensor chip using standard ethyl (dimethylaminopropyl) carbodiimide (EDC)/N-hydroxysuccinimide (NHS) chemistry, with ethanolamine blocking, in a running buffer of 10 mM HEPES pH 7.4, 150 mM NaCl, 3 mM EDTA, 0.05% surfactant p20, to a density of ˜3000 RU. Purified antibodies (10 μg/mL) or expression supernatants (diluted to ˜10 ug/ml) were captured on the protein A surface to a density of ˜1000-1200 RU, and the binding of FcγR analytes was tested in running buffer consisting of 10 mM NaPO4, 130 mM NaCl, 0.05% p20, buffer (PBS-T) pH 7.1 at 25° C., using 120 s association time and 120 s dissociation time at a flow rate of 20 μL/min. The data were analyzed using Biacore 8K evaluation software, by determining the measured binding response as a percentage of theoretical maximum binding response for each antibody (% Rmax), based on the level of captured antibody, assuming 100% fractional activity and only taking into account protein mass without glycosylation, as follows. T compare the FcgR binding of different molecules, the SPR binding data was analyzed by calculating the maximum binding response as a percentage of the theoretical maximum binding response (% Rmax) as generally shown in Eq. 1:

$$\% R max = \frac{( Observed Binding Response Analyte )}{( Theoretical Maximum Binding Response Analyte )} \qquad Eq . 1$$

Specifically, the % Rmax was calculated using the equation:

$$Eq . 2$$

$$\% R max = \frac{( Binding Response Analyte )}{\frac{( Mw Analyte )}{( Mw Ligand )} \times ( \begin{matrix}Response \\ Ligand\end{matrix} ) \times ( \text{analyte:ligand} stochiometry )}$$

where “Analyte” is the antibody and “Ligand” is the captured FcgR protein. This analysis does not take into account the mass of glycosylation of antibody or FcgR, and assumes 100% fractional activity for the captured ligand.

[0437] The “% Rmax analysis” is particularly useful for evaluating the binding of the “low affinity” FcgRs, e.g., hCD32a-H131, hCD32a-R131, hCD32b, hCD16a-V158, hCD16a-F158, hCD16b-NA1, and hCD16b-NA2, which have relatively fast association and dissociation rates and affinities near or below the analyte concentration tested (1 micromolar (μM)), so saturation of the surface is generally not achieved under these conditions. In contrast, the “high affinity” FcgR hCD64 binds with higher affinity and slower dissociation kinetics than the other FcgRs, particularly to IgG1 and IgG4, and thus these isotypes do typically saturate the hCD64 surface under micromolar analyte concentrations, and are more difficult to differentiate affinities using % Rmax. For these interactions, differences between antibodies can be easily observed by comparison of the dissociation rates in the sensorgram data.

[0438] The results are shown in Table 22 and exemplary sensorgram data are provided in FIG. 21A-L.

TABLE 22
Binding of antibodies with wild-type or mutated Fcs to FcγRs shown as percentage of Rmax

| | | | 10 uM | 10 uM | | 10 uM | 10 uM |
|---|---|---|---|---|---|---|---|
| | | 1 uM | hCD32a- | hCD32a- | 10 uM | hCD16a- | hCD16a- |
| Antibody | Sample | hCD64 | H131 | R131 | hCD32b | V158 | F158 |
| Ab1-hIgG1f | Purified | 126% | 98% | 93% | 61% | 116% | 45% |
| Ab2-hIgG1f | Purified | 123% | 98% | 96% | 73% | 116% | 65% |
| Ab1-NF | Purified | 125% | 97% | 98% | 76% | 124% | 130% |
| Ab33-IgG2.3 | Purified | 16% | 100% | 69% | 29% | 27% | 4% |
| Ab4-hz1-P238K | Purified | 116% | 0% | 1% | 1% | −1% | −1% |
| Ab2-IgG1.3f-P238K | supernatant | 1% | 1% | 3% | 2% | 0% | 0% |
| Ab2-IgG1f-P238K | supernatant | 109% | −3% | −2% | −2% | −4% | −4% |
| Ab2-IgG1f-L235E-P238K | supernatant | 11% | 1% | 3% | 3% | 0% | −1% |
| Ab2-IgG1f-L235E- | supernatant | 11% | 2% | 5% | 3% | 0% | 0% |
| P238K-K322A | | | | | | | |
| Ab2-IgG2.3G1.3f-P238K | supernatant | 2% | 1% | 3% | 1% | 0% | 0% |
| Ab2-IgG2.3G1-L235E-P238K | supernatant | 16% | 1% | 4% | 3% | 1% | 0% |
| Ab2-IgG2.3G1-L235E- | supernatant | 16% | 2% | 5% | 3% | 0% | 0% |
| P238K-K322A | | | | | | | |
| Ab2-IgG2.5G1.3f-P238K | supernatant | 2% | 1% | 3% | 2% | 0% | 0% |
| Ab2-IgG2.5G1-L235E- | supernatant | 15% | 2% | 5% | 3% | 0% | 0% |
| P238K-K322A | | | | | | | |
| Ab4-IgG1fa | supernatant | 124% | 99% | 95% | 71% | 116% | 59% |
| Ab4-IgG1.3fa | supernatant | 7% | 2% | 29% | 17% | 4% | 1% |
| Ab4-IgG1fa-P238K | supernatant | 116% | 1% | 1% | 1% | 0% | 0% |
| Ab4-IgG1fa-L235A-P238K | supernatant | 51% | 0% | 1% | 0% | −1% | −1% |
| Ab4-IgG1fa-L235E-P238K | supernatant | 9% | 0% | 3% | 2% | 0% | 0% |
| Ab4-IgG1.3fa-P238K | supernatant | 1% | 0% | 2% | 1% | 0% | −1% |
| Ab4-IgG1fa-L235E- | supernatant | 11% | 1% | 4% | 1% | −1% | −1% |
| P238K-K322A | | | | | | | |
| Ab4-IgG2.3 | supernatant | 16% | 98% | 73% | 31% | 34% | 4% |
| Ab4-IgG2.3-P238K | supernatant | 1% | 1% | 2% | 1% | 0% | 0% |
| Ab4-IgG2.3G1 | supernatant | 123% | 95% | 93% | 72% | 113% | 62% |
| Ab4-IgG2.3G1-P238K | supernatant | 116% | 0% | 1% | 1% | −1% | −2% |
| Ab4-IgG2.5G1-P238K | supernatant | 118% | 1% | 2% | 2% | 0% | 0% |
| Ab4-IgG2.3G1-L235E-P238K | supernatant | 13% | 0% | 3% | 3% | 0% | 0% |
| | | | 1 uM | 1 uM | | 1 uM | 1 uM |
| | | 0.1 uM | hCD32a- | hCD32a- | 1 uM | hCD16a- | hCD16a- |
| | Antibody | hCD64 | H131 | R131 | hCD32b | V158 | F158 |
| | Ab1-hIgG1f | 126% | 54% | 43% | 13% | 81% | 10% |
| | Ab2-hIgG1f | 124% | 65% | 56% | 20% | 94% | 17% |
| | Ab1-NF | 125% | 55% | 59% | 22% | 123% | 104% |
| | Ab33-IgG2.3 | 2% | 60% | 21% | 7% | 6% | 2% |
| | Ab4-hz1-P238K | 88% | 0% | 0% | 0% | 0% | 0% |
| | Ab2-IgG1.3f-P238K | 0% | 1% | 1% | 1% | 0% | 0% |
| | Ab2-IgG1f-P238K | 89% | 1% | 1% | 1% | 0% | 0% |
| | Ab2-IgG1f-L235E- | 2% | 0% | 1% | 1% | 0% | 0% |
| | P238K | | | | | | |
| | Ab2-IgG1f-L235E- | 2% | 1% | 1% | 1% | 1% | 0% |
| | P238K-K322A | | | | | | |
| | Ab2-IgG2.3G1.3f-P238K | 0% | 0% | 1% | 1% | 0% | 0% |
| | Ab2-IgG2.3G1-L235E- | 2% | 1% | 1% | 1% | 1% | 1% |
| | P238K | | | | | | |
| | Ab2-IgG2.3G1-L235E- | 2% | 1% | 1% | 1% | 1% | 0% |
| | P238K-K322A | | | | | | |
| | Ab2-IgG2.5G1.3f-P238K | 0% | 1% | 1% | 1% | 1% | 1% |
| | Ab2-IgG2.5G1-L235E- | 2% | 1% | 1% | 1% | 1% | 1% |
| | P238K-K322A | | | | | | |
| | Ab4-IgG1fa | 125% | 63% | 53% | 19% | 91% | 15% |
| | Ab4-IgG1.3fa | 1% | 0% | 4% | 2% | 1% | 0% |
| | Ab4-IgG1fa-P238K | 87% | 1% | 1% | 1% | 0% | 0% |
| | Ab4-IgG1fa-L235A- | 10% | 0% | 0% | 0% | 0% | 0% |
| | P238K | | | | | | |
| | Ab4-IgG1fa-L235E- | 1% | 0% | 1% | 1% | 0% | 0% |
| | P238K | | | | | | |
| | Ab4-IgG1.3fa-P238K | 0% | 0% | 1% | 0% | 0% | 0% |
| | Ab4-IgG1fa-L235E- | 2% | 0% | 1% | 0% | 0% | 0% |
| | P238K-K322A | | | | | | |
| | Ab4-IgG2.3 | 2% | 66% | 23% | 6% | 7% | 2% |
| | Ab4-IgG2.3-P238K | 0% | 2% | 2% | 2% | 1% | 1% |
| | Ab4-IgG2.3G1 | 123% | 62% | 55% | 21% | 90% | 16% |
| | Ab4-IgG2.3G1-P238K | 91% | 0% | 0% | 0% | 0% | −1% |
| | Ab4-IgG2.5G1-P238K | 94% | 1% | 1% | 1% | 1% | 1% |
| | Ab4-IgG2.3G1-L235E- | 2% | 0% | 1% | 1% | 0% | 0% |
| | P238K | | | | | | |

[0439] As shown in Table 22 and in FIG. 22, the combination mutants demonstrated very weak FcR binding. Addition of L235 mutations to P238K isotype reduced CD64 binding to similar levels as IgG1.3f. L235E was superior to L235A mutation for reducing CD64 binding. Adding the P238K mutation to IgG2 (IgG2.3-P238K) resulted in a fully inert isotype, demonstrating no detectable binding to any of the FcR proteins. The mutations also showed similar trends in the context of IgG1 and IgG2.xG1 formats. K322A mutation, which reduce c1q binding (CDC activity), and was added in some constructs, had minimal impact on FcR binding so not much effect of K322A was observed. Reduced binding of IgG1 heavy chain constant regions comprising P238K to low affinity FcgRs is observed even in the presence of cross-linking.

[0440] The amino acid SEQ ID NOs of the constructs used are set forth below, wherein “First” refers to the backbone of the heavy chain constant region and “Second” refers to the additional amino acid substitutions. “1.3” refers to L234A, L235E and G237A.

| | First: | | | | | |
|---|---|---|---|---|---|---|
| | | | IgG2.3 | | IgG2.5 | |
| Second: | IgG1fa | IgG1f | IgG2 C219S | IgG2.3G1f | IgG2 C131S) | IgG2.5G1f |
| — | 233 | 246 | 240 | 242 | 255 | 257 |
| 1.3 | 234 | 248 | | 252 | | 259 |
| P238K | 235 (198) | 247 | 241 | 243 | 256 | 245 = 258 |
| 1.3 P238K | 236 | 249 | | 253 | | 260 |
| P238K L235E | 237 | 250 | | 244 | | 261 |
| P238K L235A | 238 | | | | | |
| P238K L235E | 239 | 251 | | 254 | | 262 |
| K322A | | | | | | |

The DSC thermal stability of the CH2 domain of the constructs is shown in the Table below. The results show that at least some mutants retain reasonably good stability.

| Sample | Tm1 (° C.) | # mutations |
|---|---|---|
| IgG2 | 72.6 | 0 |
| IgG1 | 70.7 | 0 |
| IgG1.3 | 68.2 | 3 |
| P238K | 65.4 | 1 |
| IgG2-P238K | 64.7 | 1 |
| IgG1.3-238PK | 62.9 | 4 |
| L235E-P238K | 62.5 | 2 |
| IgG1.3-P238K-K322A | 60.9 | 5 |
| L235E-P238K-K322A | 60.8 | 3 |

### Example 15: Elimination of Effector Functions with IgG1.3 Fc

[0441] This Example is described in Examples 2 and 3 of co-filed and co-owned PCT application entitled “MODIFIED IgG1 Fc DOMAINS AND ANTI-CD40 DOMAIN ANTIBODY FUSIONS THEREWITH.”

[0442] This Example shows that an antibody or polypeptide with an IgG1.3 Fc is essentially devoid of binding to CD16, CD32a, CD32b and CD64. This has also been observed when an IgG1.3 Fc was linked to the variable domain of anti-TIM3 antibodies (see WO2018/013818). IgG1.3 was derived from the “IgG1.1” Fc (“IgG1.1” is an IgG1 with L234A, L235E, G237A, A330S and P331S substitutions) by removing A330S and P331S, thereby retaining 3 of the 5 mutations, i.e., L234A, L235E, G237A. It was surprisingly discovered that the absence of A330S and P331S in the IgG1.1 Fc did not significantly affect the inertness of this Fc. Below are exemplary FcγR binding measurements of IgG1.1 and IgG1.3 (and other Fcs for comparative purposes) containing antibodies and fusion proteins, comparing the inertness of IgG1.1 and IgG1.3 in the context of an antibody as well as in the context of a non-antibody protein.

[0443] Materials and Methods used in this example include the following.

[0444] FcgR Binding SPR: FcgR binding can be measured in vitro using purified FcγRs using Biacore™ surface plasmon resonance (SPR). Two methods were used herein.

[0445] One method tests the binding of purified antibodies or dAb-Fc proteins to His-tagged FcgR proteins (FcgR-His (“FcgR” is used interchangeably with “FcγR”) which are captured on the immobilized Fab fragment of an anti-His antibody. These experiments are performed on either a Biacore™ T100 or Biacore™ T200 instrument (GE Healthcare) at 25° C. The Fab fragment from a murine anti-6×His antibody (generated in house) is immobilized on a CMS sensor chip using standard ethyl(dimethylaminopropyl) carbodiimide (EDC)/N-hydroxysuccinimide (NHS) chemistry with ethanolamine blocking, to a density of ˜3000 Resonance Units RU in a running buffer of 10 millimolar (mM) HEPES pH 7.4, 150 mM NaCl, 3 mM EDTA, 0.05% surfactant p20 (HBS-EP+). All remaining studies are performed using a running buffer of 10 mM NaPO₄, 130 mM NaCl, 0.05% p20 (PBS-T) at pH 7.1. Various FcgR proteins containing a C-terminal 6x poly-histidine tag (generated in house) were captured on this surface (typically using FcgR-His protein concentration of ˜7 μg/ml) using a contact time of 30 seconds (s) at 10 μl/min. Various concentrations of purified antibody or dAb-Fc proteins are tested for binding, for example using an association time of 120 seconds at 30 μmin, and a dissociation time of 120 seconds at 30 μl/min. FcgR proteins tested in these studies include the “high affinity” FcgR hCD64 (hFcgRI), as well as the “low affinity” FcgRs hCD32a-H131 (FcgRIIa-H131), hCD32a-R131 (FcgRIIa-R131), hCD32b (FcgRIIb), hCD16a-V158 (FcgRIIIa-V158), hCD16a-F158 (FcgRIIIa-F158), hCD16b-NA1 (FcgRIIIb-NA1), and hCD16b-NA2 (FcgRIIIb-NA2).

[0446] To quantitatively analyze the binding responses and compare the FcgR binding of different molecules, the SPR binding data can be analyzed by calculating the maximum binding response as a percentage of the theoretical maximum binding response (% Rmax) as generally shown in Eq. 1:

$$\% R max = \frac{( Observed Binding Response Analyte )}{( Theoretical Maximum Binding Response Analyte )} \qquad Eq . 1$$

Specifically, the % Rmax is calculated using the equation:

$$Eq . 2$$

$$\% R max = \frac{( Binding Response Analyte )}{\frac{( Mw Analyte )}{( Mw Ligand )} \times ( \begin{matrix}Response \\ Ligand\end{matrix} ) \times ( \text{analyte:ligand} stochiometry )}$$

where “Analyte” is the antibody or dAb-Fc and “Ligand” is the captured FcgR protein. This analysis does not take into account the mass of glycosylation of antibody, dAb-Fc or FcgR, and assumes 100% fractional activity for the captured ligand.

[0447] The “% Rmax analysis” is particularly useful for evaluating the binding of the “low affinity” FcgRs, e.g., hCD32a-H131, hCD32a-R131, hCD32b, hCD16a-V158, hCD16a-F158, hCD16b-NA1, and hCD16b-NA2, which have relatively fast association and dissociation rates and affinities near or below the analyte concentration tested (1 micromolar (μM)), so saturation of the surface is generally not achieved under these conditions. In contrast, the “high affinity” FcgR hCD64 binds with higher affinity and slower dissociation kinetics than the other FcgRs, particularly to IgG1 and IgG4, and thus these isotypes do typically saturate the hCD64 surface under micromolar analyte concentrations, and are more difficult to differentiate affinities using % Rmax. For these interactions, differences between antibodies can be easily observed by comparison of the dissociation rates in the sensorgram data.

[0448] A second SPR assay for testing the interaction between antibodies or dAb-Fc proteins with FcgR proteins is a protein A capture method. These experiments are also performed on either a Biacore™ T100 or Biacore™ T200 instrument (GE Healthcare) at 25° C. For these studies, protein A is immobilized on flow cells 1-4 of a CM5 sensor chip using standard ethyl (dimethylaminopropyl) carbodiimide (EDC)/N-hydroxysuccinimide (NHS) chemistry, with ethanolamine blocking, in a running buffer of 10 mM HEPES pH 7.4, 150 mM NaCl, 3 mM EDTA, 0.05% surfactant p20, to a density of ˜3000 RU. Antibody or dAb-Fc proteins (typically ˜3-10 μg/ml) are captured on the protein A surface, and the binding of FcgR analytes are tested in running buffer consisting of 10 mM NaPO₄, 130 mM NaCl, 0.05% p20, buffer (PBS-T) at pH 7.1 and at 25° C., using for example, 120 sec association time and 180 sec dissociation time at a flow rate of 30 μL/min.

[0449] The protein A capture assay can also be used to analyze unpurified supernatants containing antibody or dAb-Fc molecules. For this analysis, the antibody or dAb-Fc proteins can be captured from either undiluted supernatants or supernatants diluted with running buffer. To quantitatively analyze the binding responses and compare the FcgR binding of different molecules, the SPR binding data can be analyzed by calculating the % Rmax using Eq. 1 above, wherein Analyte is the purified FcgR protein, and Ligand is the captured antibody or dAb-Fc protein.

[0450] In addition to % Rmax analysis, quantitative analysis of the kinetics and affinity of binding can be performed by testing a titration of FcgR analyte for binding to protein A captured antibodies or dAb-Fc proteins. For example, FcgR in a 3:1 serial dilution can be titrated from 10 μM down to either 0.15 nM (hCD64) or 1.5 nM (all other FcgRs). These kinetic data can be fit to either a 1:1 Langmuir model or to a steady-state binding model using Biacore™ T200 evaluation software to obtain kinetic and affinity values.

[0451] dAb-Fcs: The dAb-Fcs studied in this example are shown in Table 23. In these sequences, the single variable domain 3h56-269 residues are amino acids 1-118 (underlined). The linker AST is double-underlined.

TABLE 23

| Seq # | Sample ID | Sequence |
|---|---|---|
| 263 | 3h56-269-IgG4.1 | EVQLLESGGGLVQPGGSLRLSCAASGFTFRDYEMWWVRQAPGKGLERVSA |
| | OR | INPQGTRTYYADSVKGRFTISRDNSKNTLYLQMNSLRAEDTAVYYCAKLP |
| | BMS-986090 | FRFSDRGQGTLVTVSSASTESKYGPPCPPCPAPEFLGGPSVFLFPPKPKD |
| | | TLMISRTPEVTCVVVDVSQEDPEVQFNWYVDGVEVHNAKTKPREEQFNST |
| | | YRVVSVLTVLHQDWLNGKEYKCKVSNKGLPSSIEKTISKAKGQPREPQVY |
| | | TLPPSQEEMTKNQVSLTCLVKGFYPSDIAVEWESNGQPENNYKTTPPVLD |
| | | SDGSFFLYSRLTVDKSRWQEGNVFSCSVMHEALHNHYTQKSLSLSLGK |
| 264 | 3h56-269-CT | EVQLLESGGGLVQPGGSLRLSCAASGFTFRDYEMWWVRQAPGKGLERVSA |
| | | INPQGTRTYYADSVKGRFTISRDNSKNTLYLQMNSLRAEDTAVYYCAKLP |
| | | FRFSDRGQGTLVTVSSASTEPKSSDKTHTSPPSPAPELLGGSSVFLFPPK |
| | | PKDTLMISRTPEVTCVVVDVSHEDPEVKFNWYVDGVEVHNAKTKPREEQY |
| | | NSTYRVVSVLTVLHQDWLNGKEYKCKVSNKALPAPIEKTISKAKGQPREP |
| | | QVYTLPPSRDELTKNQVSLTCLVKGFYPSDIAVEWESNGQPENNYKTTPP |
| | | VLDSDGSFFLYSKLTVDKSRWQQGNVFSCSVMHEALHNHYTQKSLSLSPGK |
| 265 | 3h56-269-IgG1.1f | EVQLLESGGGLVQPGGSLRLSCAASGFTFRDYEMWWVRQAPGKGLERVSA |
| | | INPQGTRTYYADSVKGRFTISRDNSKNTLYLQMNSLRAEDTAVYYCAKLPFRF |
| | | SDRGQGTLVTVSSASTEPKSCDKTHTCPPCPAPEAEGAPSVFLFPPKPKDTL |
| | | MISRTPEVTCVVVDVSHEDPEVKFNWYVDGVEVHNAKTKPREEQYNSTYRV |
| | | VSVLTVLHQDWLNGKEYKCKVSNKALPSSIEKTISKAKGQPREPQVYTLPPSR |
| | | EEMTKNQVSLTCLVKGFYPSDIAVEWESNGQPENNYKTTPPVLDSDGSFFLY |
| | | SKLTVDKSRWQQGNVFSCSVMHEALHNHYTQKSLSLSPGK |
| 266 | 3h56-269-IgG1.3f | EVQLLESGGGLVQPGGSLRLSCAASGFTFRDYEMWWVRQAPGKGLERVSA |
| | | INPQGTRTYYADSVKGRFTISRDNSKNTLYLQMNSLRAEDTAVYYCAKLPFRF |
| | | SDRGQGTLVTVSSASTEPKSCDKTHTCPPCPAPEAEGAPSVFLFPPKPKDTL |
| | | MISRTPEVTCVVVDVSHEDPEVKFNWYVDGVEVHNAKTKPREEQYNSTYRV |
| | | VSVLTVLHQDWLNGKEYKCKVSNKALPAPIEKTISKAKGQPREPQVYTLPPSR |
| | | EEMTKNQVSLTCLVKGFYPSDIAVEWESNGQPENNYKTTPPVLDSDGSFFLY |
| | | SKLTVDKSRWQQGNVFSCSVMHEALHNHYTQKSLSLSPGK |
| 267 | 3h56-269-IgG1- | EVQLLESGGGLVQPGGSLRLSCAASGFTFRDYEMWWVRQAPGKGLERVSA |
| | D265A | INPQGTRTYYADSVKGRFTISRDNSKNTLYLQMNSLRAEDTAVYYCAKLPFRF |
| | | SDRGQGTLVTVSSASTEPKSCDKTHTCPPCPAPELLGGPSVFLFPPKPKDTLM |
| | | ISRTPEVTCVVVAVSHEDPEVKFNWYVDGVEVHNAKTKPREEQYNSTYRVV |
| | | SVLTVLHQDWLNGKEYKCKVSNKALPAPIEKTISKAKGQPREPQVYTLPPSRE |
| | | EMTKNQVSLTCLVKGFYPSDIAVEWESNGQPENNYKTTPPVLDSDGSFFLYS |
| | | KLTVDKSRWQQGNVFSCSVMHEALHNHYTQKSLSLSPGK |

The sequences of IgG1.1f and IgG1.3f, each starting with “EPK” (i.e., the sequences in SEQ ID NOs: 77 and 78) that are shown in Table 23 are identical to the sequences starting at EPK in SEQ ID NOs 83 and 248, respectively.
Control mAb: A control monoclonal antibody (1F4) was also formatted with similar Fc domain mutations. The individual chain sequences are shown in Table 24, including the sequence (SEQ ID NO: 268) of the portion of the 1F4 heavy chain including the variable region and CH1 region. This sequence is underlined in the heavy chain sequences (SEQ ID NOs: 269-275). The pair of heavy chain and light chain sequences for each 1F4 mAb variant is shown in Table 25.

TABLE 24

| Seq | | |
|---|---|---|
| ID | | |
| No. | Sequence identity | Sequence |
| 268 | 1F4 Heavy chain | EVQLLESGGGLVQPGGSLRLSCAASGFTFSIYAMSWVRQAPG |
| | variable region | KGLEWVSAISDSGGRTYFADSVRGRFTISRDNSKNTLSLQMNS |
| | and CH1 | LRAEDTAVYYCAKVDYSNYLFFDYWGQGTLVTVSSASTKGP |
| | | SVFPLAPSSKSTSGGTAALGCLVKDYFPEPVTVSWNSGALTSG |
| | | VHTFPAVLQSSGLYSLSSVVTVPSSSLGTQTYICNVNHKPSNT |
| | | KVDKRV |
| 269 | 1F4 Light chain | EIVLTQSPGTLSLSPGERATLSCRASQSISSSYLAWYQQKPGQA |
| | variable region | PRLLIYGASSRATGIPDRFSGSGSGTDFTLTISRLEPEDFAVYYC |
| | and CL | QQYGSSPYTFGQGTKLEIKRTVAAPSVFIFPPSDEQLKSGTASV |
| | | VCLLNNFYPREAKVQWKVDNALQSGNSQESVTEQDSKDSTY |
| | | SLSSTLTLSKADYEKHKVYACEVTHQGLSSPVTKSFNRGEC |
| 270 | 1F4-IgG1f heavy | EVQLLESGGGLVQPGGSLRLSCAASGFTFSIYAMSWVRQAPG |
| | chain | KGLEWVSAISDSGGRTYFADSVRGRFTISRDNSKNTLSLQMNS |
| | | LRAEDTAVYYCAKVDYSNYLFFDYWGQGTLVTVSSASTKGP |
| | | SVFPLAPSSKSTSGGTAALGCLVKDYFPEPVTVSWNSGALTSG |
| | | VHTFPAVLQSSGLYSLSSVVTVPSSSLGTQTYICNVNHKPSNT |
| | | KVDKRVEPKSCDKTHTCPPCPAPELLGGPSVFLFPPKPKDTLM |
| | | ISRTPEVTCVVVDVSHEDPEVKFNWYVDGVEVHNAKTKPREE |
| | | QYNSTYRVVSVLTVLHQDWLNGKEYKCKVSNKALPAPIEKTI |
| | | SKAKGQPREPQVYTLPPSREEMTKNQVSLTCLVKGFYPSDIAV |
| | | EWESNGQPENNYKTTPPVLDSDGSFFLYSKLTVDKSRWQQG |
| | | NVFSCSVMHEALHNHYTQKSLSLSPGK |
| 271 | 1F4-IgG4.1 heavy | EVQLLESGGGLVQPGGSLRLSCAASGFTFSIYAMSWVRQAPG |
| | chain | KGLEWVSAISDSGGRTYFADSVRGRFTISRDNSKNTLSLQMNS |
| | | LRAEDTAVYYCAKVDYSNYLFFDYWGQGTLVTVSSASTKGP |
| | | SVFPLAPCSRSTSESTAALGCLVKDYFPEPVTVSWNSGALTSG |
| | | VHTFPAVLQSSGLYSLSSVVTVPSSSLGTKTYTCNVDHKPSNT |
| | | KVDKRVESKYGPPCPPCPAPEFLGGPSVFLFPPKPKDTLMISRT |
| | | PEVTCVVVDVSQEDPEVQFNWYVDGVEVHNAKTKPREEQFN |
| | | STYRVVSVLTVLHQDWLNGKEYKCKVSNKGLPSSIEKTISKA |
| | | KGQPREPQVYTLPPSQEEMTKNQVSLTCLVKGFYPSDIAVEW |
| | | ESNGQPENNYKTTPPVLDSDGSFFLYSRLTVDKSRWQEGNVF |
| | | SCSVMHEALHNHYTQKSLSLSLG |
| 272 | 1F4-IgG1.1f | EVQLLESGGGLVQPGGSLRLSCAASGFTFSIYAMSWVRQAPG |
| | heavy chain | KGLEWVSAISDSGGRTYFADSVRGRFTISRDNSKNTLSLQMNS |
| | | LRAEDTAVYYCAKVDYSNYLFFDYWGQGTLVTVSSASTKGP |
| | | SVFPLAPSSKSTSGGTAALGCLVKDYFPEPVTVSWNSGALTSG |
| | | VHTFPAVLQSSGLYSLSSVVTVPSSSLGTQTYICNVNHKPSNT |
| | | KVDKRVEPKSCDKTHTCPPCPAPEAEGAPSVFLFPPKPKDTLM |
| | | ISRTPEVTCVVVDVSHEDPEVKFNWYVDGVEVHNAKTKPREE |
| | | QYNSTYRVVSVLTVLHQDWLNGKEYKCKVSNKALPSSIEKTI |
| | | SKAKGQPREPQVYTLPPSREEMTKNQVSLTCLVKGFYPSDIAV |
| | | EWESNGQPENNYKTTPPVLDSDGSFFLYSKLTVDKSRWQQG |
| | | NVFSCSVMHEALHNHYTQKSLSLSPG |
| 273 | 1F4-IgG1.3f | EVQLLESGGGLVQPGGSLRLSCAASGFTFSIYAMSWVRQAPG |
| | heavy chain | KGLEWVSAISDSGGRTYFADSVRGRFTISRDNSKNTLSLQMNS |
| | | LRAEDTAVYYCAKVDYSNYLFFDYWGQGTLVTVSSASTKGP |
| | | SVFPLAPSSKSTSGGTAALGCLVKDYFPEPVTVSWNSGALTSG |
| | | VHTFPAVLQSSGLYSLSSVVTVPSSSLGTQTYICNVNHKPSNT |
| | | KVDKRVEPKSCDKTHTCPPCPAPEAEGAPSVFLFPPKPKDTLM |
| | | ISRTPEVTCVVVDVSHEDPEVKFNWYVDGVEVHNAKTKPREE |
| | | QYNSTYRVVSVLTVLHQDWLNGKEYKCKVSNKALPAPIEKTI |
| | | SKAKGQPREPQVYTLPPSREEMTKNQVSLTCLVKGFYPSDIAV |
| | | EWESNGQPENNYKTTPPVLDSDGSFFLYSKLTVDKSRWQQG |
| | | NVFSCSVMHEALHNHYTQKSLSLSPG |
| 274 | 1F4-D265A heavy | EVQLLESGGGLVQPGGSLRLSCAASGFTFSIYAMSWVRQAGK |
| | chain | GLEWVSAISDSGGRTYFADSVRGRFTISRDNSKNTLSLQMNSL |
| | | RAEDTAVYYCAKVDYSNYLFFDYWGQGTLVTVSSASTKGPS |
| | | VFPLAPSSKSTSGGTAALGCLVKDYFPEPVTVSWNSGALTSG |
| | | VHTFPAVLQSSGLYSLSSVVTVPSSSLGTQTYICNVNHKPSNT |
| | | KVDKRVEPKSCDKTHTCPPCPAPELLGGPSVFLFPPKPKDTLM |
| | | ISRTPEVTCVVVAVSHEDPEVKFNWYVDGVEVHNAKTKPREE |
| | | QYNSTYRVVSVLTVLHQDWLNGKEYKCKVSNKALPAPIEKTI |
| | | SKAKGQPREPQVYTLPPSREEMTKNQVSLTCLVKGFYPSDIVE |
| | | WESNGQPENNYKTTPPVLDSDGSFFLYSKLTVDKSRWQQGN |
| | | VFSCSVMHEALHNHYTQKSLSLSPGK |
| 275 | 1F4-CT heavy | EVQLLESGGGLVQPGGSLRLSCAASGFTFSIYAMSWVRQAPG |
| | chain | KGLEWVSAISDSGGRTYFADSVRGRFTISRDNSKNTLSLQMNS |
| | | LRAEDTAVYYCAKVDYSNYLFFDYWGQGTLVTVSSASTKGP |
| | | SVFPLAPSSKSTSGGTAALGCLVKDYFPEPVTVSWNSGALTSG |
| | | VHTFPAVLQSSGLYSLSSVVTVPSSSLGTQTYICNVNHKPSNT |
| | | KVDKRVEPKSCDKTHTSPPSPAPELLGGSSVFLFPPKPKDTLMI |
| | | SRTPEVTCVVVDVSHEDPEVKFNWYVDGVEVHNAKTKPREE |
| | | QYNSTYRVVSVLTVLHQDWLNGKEYKCKVSNKALPAPIEKTI |
| | | SKAKGQPREPQVYTLPPSRDELTKNQVSLTCLVKGFYPSDIAV |
| | | EWESNGQPENNYKTTPPVLDSDGSFFLYSKLTVDKSRWQQG |
| | | NVFSCSVMHEALHNHYTQKSLSLSPGK |

TABLE 25

| mAb name | HC | LC |
|---|---|---|
| 1F4-IgG1f | SEQ #: 270 | SEQ #: 269 |
| 1F4-IgG4.1 | SEQ #: 271 | SEQ #: 269 |
| 1F4-IgG1.1f | SEQ #: 272 | SEQ #: 269 |
| 1F4-IgG1.3f | SEQ #: 273 | SEQ #: 269 |
| 1F4-D265A | SEQ #: 274 | SEQ #: 269 |
| 1F4-CT | SEQ #: 275 | SEQ #: 269 |

[0452] Results: dAb-Fc molecules were produced with mutations in the Fc domain to reduce FcgR binding. Specifically, the anti-CD40 domain antibody 3h56-269 was formatted with the following Fc domain variants: IgG1.1f, IgG1.3f, and IgG1-D265A. In each of 3h-56-269-IgG1.1f (SEQ ID NO: 77), 3h-56-269-IgG1.3f (SEQ ID NO: 78), and 3h-56-269-IgG1-D265A (SEQ ID NO: 79), amino acids 1-116 are 3h-56-269 dAb, amino acids 117-119 are a linker, and amino acids 120-351 are the Fc domain.

[0453] Each these dAb-Fc fusion proteins, as well as each of 3h56-269-IgG4.1 and 3h56-269-CT, was confirmed to bind with high affinity to purified human-CD40 monomer (hCD40monomer, generated in house) as measured by Biacore™ SPR. As shown in Table 26, the KD values range between 7.3 nM and 11.5 nM for the different Fc variants. Each of the dAb-Fc molecules also bound human CD40 with high avidity, as measured by SPR using hCD40-Fc on the surface of a sensor chip and the dAb-Fc molecules as soluble analytes in solution, where data for 250 nM and 25 nM dAb-Fc analyte injections were fit to a 1:1 Langmuir model to estimate avidity-influenced apparent KD values (KDₐₚₚₐᵣₑₙₜ) for all dAb-Fcs as <1 nM. See Table 26.

TABLE 26
SPR data for binding of dAb-Fc molecules to human CD40.

| | hCD40monomer | | | dAb-Fc binding |
|---|---|---|---|---|
| | binding to dAb-Fc | | | to immobilized |
| | molecules captured on | | | hCD40-Fc |
| | immobilized protein | | | surface |
| | A surface (Affinity) | | | (Avidity) |
| | ka | | KD | KDₐₚₚₐᵣₑₙₜ |
| Ligand | (1/Ms) | kd (1/s) | (nM) | (nM) |
| 3h56-269-IgG4.1 | 8.5E+03 | 9.7E-05 | 11.5 | <1 |
| 3h56-269-CT | 1.6E+04 | 1.3E-04 | 8.0 | <1 |
| | 1.6E+04 | 1.2E-04 | 7.3 | <1 |
| 3h56-269-CT | 1.6E+04 | 1.3E-04 | 7.7 | <1 |
| (UCOE-CHO)* | 1.9E+04 | 1.4E-04 | 7.0 | <1 |
| 3h56-269-IgG1.1f | 9.6E+03 | 1.0E-04 | 10.8 | <1 |
| 3h56-269-IgG1.3f | 9.9E+03 | 9.1E-05 | 9.2 | <1 |
| | 1.1E+04 | 1.1E-04 | 9.8 | <1 |
| 3h56-269-IgG1- | 1.1E+04 | 9.9E-05 | 9.0 | <1 |
| D265A | | | | |

*3h-56-269-CT expressed and purified from UCOE-CHO cells.

[0454] The FcgR binding properties of the dAb-Fc molecules and the various control monoclonal 1F4 antibodies were characterized by SPR. The first assay involved binding of 1 μM or 10 μM dAb-Fcs or a human-IgG1f antibody control (1F4-IgG1f) to anti-His Fab captured FcgR-His surfaces. These data are shown in Table 27.

TABLE 27
% Rmax data for 1 μM or 10 μM dAb-Fcs or 1F4-IgG1f antibody
control binding to anti-His Fab captured hFcgR-His proteins.

| | | Anti-His Fab captured FcgR | | | | | |
|---|---|---|---|---|---|---|---|
| | | High | | | | | |
| | | affinity | Low Affinity FcgR | | | | |
| | Conc | FcgR | hCD32a- | hCD32a- | | hCD16a- | hCD16b- |
| Sample | (μM) | hCD64 | H131 | R131 | hCD32b | V158 | NA2 |
| 1F4-IgG1f | 1 | 65% | 31% | 19% | 5% | 31% | 13% |
| 3h56-269-IgG4.1 | 1 | 68% | 27% | 30% | 20% | 6% | 1% |
| 3h56-269-IgG1-D265A | 1 | 68% | 7% | 2% | 0% | 1% | 0% |
| 3h56-269-IgG1.1f | 1 | 11% | 1% | 10% | 3% | 0% | 0% |
| 3h56-269-IgG1.3f | 1 | 12% | 1% | 8% | 3% | 1% | 0% |
| 3h56-269-CT | 1 | 72% | 0% | 1% | 0% | 1% | 0% |
| 1F4-IgG1f | 10 | 65% | 62% | 51% | 24% | 52% | 36% |
| 3h56-269-IgG4.1 | 10 | 69% | 65% | 66% | 57% | 27% | 9% |
| 3h56-269-IgG1-D265A | 10 | 69% | 33% | 17% | 2% | 2% | −1% |
| 3h56-269-IgG1.1f | 10 | 39% | 6% | 43% | 21% | 3% | 2% |
| 3h56-269-IgG1.3f | 10 | 39% | 6% | 37% | 19% | 5% | 4% |
| 3h56-269-CT | 10 | 70% | 2% | 10% | 3% | 6% | −1% |

[0455] In another assay, FcgR analytes (at 1 μM or 10 μM) were tested for binding to protein A-captured dAb-Fc surfaces (data shown in Table 28) and for binding to antibody surfaces (data shown in Table 29).

TABLE 28
% RMax data for 1 μM or 10 μM FcgRs binding
to protein A-captured dAb-Fc proteins.

| | Protein A-captured dAb-Fc protein | | | | | |
|---|---|---|---|---|---|---|
| | | 3h56- | 3h56-269- | 3h56- | 3h56- | |
| | Conc | 269- | IgG1- | 269- | 269- | 3h56- |
| Sample | (μM) | IgG4.1 | D265A | IgG1.1f | IgG1.3f | 269-CT |
| hCD64 | 1 | 99% | 41% | 1% | 2% | 80% |
| hCD32a-H131 | 1 | 29% | 3% | 0% | 1% | 1% |
| hCD32a-R131 | 1 | 31% | 1% | 4% | 5% | 1% |
| hCD32b | 1 | 19% | 0% | 1% | 2% | 1% |
| hCD16a-V158 | 1 | 12% | 0% | 0% | 1% | 1% |
| hCD16B-NA2 | 1 | 2% | 0% | 0% | 0% | 0% |
| hCD64 | 10 | 119% | 85% | 3% | 7% | 114% |
| hCD32a-H131 | 10 | 70% | 18% | 4% | 6% | 7% |
| hCD32a-R131 | 10 | 71% | 4% | 18% | 26% | 7% |
| hCD32b | 10 | 59% | 1% | 9% | 12% | 4% |
| hCD16a-V158 | 10 | 47% | 2% | 2% | 6% | 7% |
| hCD16B-NA2 | 10 | 13% | 0% | 1% | 3% | 1% |

TABLE 29
% Rmax data for 1 μM or 10 μM FcgRs binding to
protein A captured antibodies.

| | | Protein A-captured antibodies | | | | | |
|---|---|---|---|---|---|---|---|
| | Conc | 1F4- | 1F4- | 1F4- | 1F4- | 1F4- | 1F4- |
| Sample | (μM) | IgG1f | IgG4.1 | D265A | IgG1.1f | IgG1.3f | CT |
| hCD64 | 1 | 138% | 126% | 96% | 8% | 5% | 120% |
| hCD32a-H131 | 1 | 62% | 29% | 7% | 2% | 1% | 2% |
| hCD32a-R131 | 1 | 48% | 33% | 3% | 5% | 3% | 2% |
| hCD32b | 1 | 11% | 17% | 1% | 1% | 1% | 1% |
| hCD16a-V158 | 1 | 97% | 15% | 1% | 3% | 2% | 2% |
| hCD16B-NA2 | 1 | 33% | 4% | 1% | 4% | 3% | 0% |
| hCD64 | 10 | 155% | 139% | 131% | 17% | 14% | 131% |
| hCD32a-H131 | 10 | 99% | 79% | 38% | 7% | 6% | 11% |
| hCD32a-R131 | 10 | 101% | 87% | 17% | 28% | 24% | 13% |
| hCD32b | 10 | 55% | 68% | 4% | 11% | 12% | 8% |
| hCD16a-V158 | 10 | 125% | 59% | 2% | 5% | 7% | 11% |
| hCD16B-NA2 | 10 | 81% | 16% | −2% | 4% | 6% | 1% |

[0456] Based on the binding responses or lack thereof in these experiments, a subset of the higher affinity dAb-Fc/FcgR or Ab/FcgR interactions with strongest binding responses were selected for kinetic/affinity characterization using analyte titrations (FcgR analytes binding to protein A captured antibodies or dAb-Fcs). These data are presented in Table 30.

TABLE 30
KD values (in nM) for purified FcgR analytes binding
to protein A captured antibodies or dAb-Fcs.

| | | hCD32a- | hCD32a- | | hCD16a- | hCD16B- |
|---|---|---|---|---|---|---|
| Sample | hCD64 | H131 | R131 | hCD32b | V158 | NA2 |
| 1F4-IgG1f | 0.2 | 920 | 1400 | >5000 | 430 | 4800 |
| 1F4-IgG4.1 | 0.58 | 3700 | 2400 | 3100 | >5000 | >5000 |
| 3h56-269-IgG4.1 | 2.8 | >5000 | 2200 | >5000 | >5000 | >5000 |
| 3h56-269-IgG1-D265A | 62 | | | | | |
| 3h56-269-IgG1.1f | >5000 | | | | | |
| 3h56-269-IgG1.3f | >5000 | >5000 | >5000 | >5000 | >5000 | >5000 |
| 3h56-269-CT | 4.6 | >5000 | >5000 | >5000 | >5000 | >5000 |

[0457] Collectively, these FcgR binding SPR data show that the IgG1f and IgG4.1 isotype molecules have significantly higher FcgR affinity across all FcgRs as compared to the modified Fc variant IgG1-D265A, IgG1.1f, IgG1.3f, or CT molecules. Of the modified Fc variants, the hCD64 binding affinity was the strongest for 3h56-269-CT (KD=4.6 nM), weaker for 3h56-269-IgG1-D265A (KD=62 nM), and the weakest for 3h56-269-IgG1.1f and 3h56-269-IgG1.3f, for which affinity was too weak to quantitate under the conditions tested (K_{D}>5 μM, which is half of the highest analyte concentration tested). All of the other FcgR interactions (hCD32a-H131, hCD32a-R131, hCD32b, hCD16a-V158, hCD16b-NA2) for the IgG1-D265A, IgG1.1f, IgG1.3f and CT variants were also too weak to obtain reliable KD values (K_{D}>5 μM). However, differences in the relative binding responses can be observed in the % Rmax data. For example, the IgG1-D265A variant has stronger binding response for hCD32a-H131 as compared to the IgG1.1f, IgG1.3f or CT variants (Table 28). In contrast, the IgG1.1f and IgG1.3f variants have stronger binding responses for hCD32a-R131 as compared to the IgG1-D265A and CT variants (Table 28).

[0458] IgG1.3 containing fusion protein or antibody were assessed by DSC, icIEF and mass spectrometry. Materials and methods are described below.

[0459] Differential Scanning calorimetry: DSC experiments were performed on a MicroCal VP-Capillary DSC instrument (Malvern Instruments, Malvern, UK) in 10 mM NaPO₄, 130 mM NaCl pH 7.1. Samples of 1 mg/ml dAb-Fc or antibody were tested using a scan range of 10-110° C. and a scan rate of 90° C./hr. Data were analyzed using MicroCal-Origin 7.0 software.

[0460] Imaged Capillary Isoelectric Focusing: icIEF experiments were performed on a ProteinSimple iCE3™ System (ProteinSimple, San Jose, Calif.). For these studies the dAb-Fc or antibody samples, typically at 2 mg/ml concentration, were mixed with a carrier ampholyte mixture consisting of 2 M urea, 0.35% methylcellulose, 1% Pharmalyte 5-8, 3% Pharmalyte 8-10.5, and pI markers 5.85 and 10.10, to a final protein concentration of 0.20 mg/mL, and analyzed using a pre-focusing time of 1 min at 1.5 kV and a focusing time of 10 min at 3 kV.

[0461] Mass Spectrometry: For mass spectrometry (mass spec) analysis, samples were reduced using 100 mM DTT, and N-deglycosylation was performed with peptide: N-Glycosidase (FPNGaseF). Liquid chromatography-mass spectrometry (LC/MS) instrumentation used was a Waters Synapt® G2 (Waters Corporation, Milford, Mass.) with a Waters Acquity® UPLC (ultra-performance liquid chromatography). The UPLC column was a Waters Acquity® BEH (ethylene bridged hybrid particle) C4 (2.1×150 mm, 300 Å, 1.7 um particle). The gradient was 10% to 38% (Mobile phase B) in 10 min at 200 μL/min flow rate. Mobile phase A was 0.1% formic acid in water. Mobile phase B was 0.1% formic acid in acetonitrile. Column temperature was 60° C. Data analysis was performed manually with the aid of Waters MassLynx™ software; spectral deconvolution was performed with the MaxEnt1 algorithm.

[0462] Accelerated Stability Studies: Accelerated stability studies were conducted by first extensively dialyzing dAb-Fc molecules in target formulation buffers at 4° C. Samples were recovered and concentrated using Amicon® Ultra Centrifugal Filter Units (Merck KgaA, Germany) and prepared at different target concentrations in dialysis buffer. These samples were incubated at various temperatures, typically 4° C., 25° C., 32° C., and/or 40° C. for several weeks, with aliquots removed and analyzed by analytical size exclusion chromatography. Analytical size exclusion chromatography was conducted on an Agilent 1260 HPLC, using a Shodex™ K403-4F column (Showa Denko America, Inc., New York, N.Y.) in a mobile phase of 100 mM Sodium Phosphate, 150 mM Sodium Chloride, pH 7.3, flow rate of 0.3 ml/min.

[0463] Results—Differential scanning calorimetry: DSC can be used to measure the thermal stability of a protein. The best fit Tm values are summarized in Table 31.

TABLE 31
Thermal melting temperature (Tm) values for
dAb-Fc molecules as determined by DSC.

| | Tm dAb and CH2 | | Tm CH3 |
|---|---|---|---|
| | domains | | domain |
| Sample | Tm1 (° C.) | Tm2 (° C.) | (° C.) |
| 3h56-269-IgG4.1 | 62.8 | | 69.6 |
| 3h56-269-CT | 55.4 | 60.4 | 83.2 |
| 3h56-269-IgG1.1f | 59.0 | 61.6 | 82.3 |
| 3h56-269-IgG1.3f | 57.0 | 62.8 | 81.9 |
| 3h56-269-IgG1- | 56.4 | 61.4 | 82.4 |
| D265A | | | |

[0464] Based on the characteristic thermal denaturation profiles for IgG Fc domains, the Fc CH3 domain transition for 3h56-269-IgG4.1 was assigned as the transition with midpoint (Tm) value of 69.6° C.; and the Fc CH3 domain of the various IgG1 molecules was assigned as the transition with Tm near ˜82-83° C. The denaturation of the dAb domain and CH2 domain for the dAb-Fcs were assigned to the transition(s) below 65° C., which differ between the different constructs, both in the onset of thermal denaturation (Tₒₙₛₑₜ), the shape of the unfolding transition, and the best fit Tm values. For example, the thermal transition for the dAb and CH2 domains of 3h56-269-IgG4.1 appears as a single overlapping or cooperative transition, with Tm value of 62.8° C. The denaturation profile for the dAb and CH2 domains of 3h56-269-IgG1-D265A, 3h56-269-IgG1.1f and 3h56-269-IgG1.3f are all consistent with a more asymmetrical transition, which was best described by two transitions having Tm values between ˜56-63° C. 3h56-269-CT had the lowest Tₒₙₛₑₜ, beginning to unfold near 40° C., with a broad thermal transition and the lowest fitted Tm values of Tm1=55.4° C. and Tm2=60.4° C.

[0465] Results—Imaged capillary isoelectric focusing (icIEF): Imaged capillary isoelectric focusing (icIEF) can be used to characterize sample homogeneity or heterogeneity. The ability to generate a homogeneous product is another important developability criterion. Consequently, during the discovery and optimization of a novel protein therapeutic, various analytical methods are utilized to characterize and quantitate sample heterogeneities, and to select for the most homogeneous molecules.

[0466] The charge profiles for dAb-Fc molecules were characterized by icIEF. The data are shown in FIG. 23. The icIEF profiles for 3h56-269-IgG4.1 (FIG. 23A), 3h56-269-IgG1.1f (FIG. 23E) and 3h56-269-IgG1.3f (FIG. 23F) are all relatively simple, each consisting of a distinct main peak with area of 69-86%, and between two and four charge variants in lower abundance. This icIEF profile is similar to the typical profile obtained for an antibody. The main peak for 3h56-269-IgG1-D265A (FIG. 23D) is somewhat lower abundance (49%) with a corresponding higher level of acidic variants with at least six detectable species. In contrast, the profile for 3h56-269-CT (FIG. 23B) is highly heterogeneous, consisting of at least 16 different species and no clear main peak. The icIEF profile for 3h56-269-CT expressed in a different cell line (UCOE-CHO) was equally heterogeneous (FIG. 23C), although the distribution of the charge variants was considerably different from the HEK293-expressed material.

[0467] Results—Mass spectrometry: Typical glycosylation on the Fc domain of IgG or Fc-containing proteins is a mixture of G0F, G1F and some G2F species. Other glycoforms, such as sialylated or non-fucosylated forms, are generally found in much lower abundance or at undetectable levels.

[0468] To characterize the glycosylation profiles of the dAb-Fc proteins, and to compare the dAb-Fc proteins to control antibodies with similar Fc mutations, mass spectrometry experiments were conducted. The data are shown in Table 32.

TABLE 32
Detectable glycoforms in dAb-Fc and antibody
molecules as determined by mass spectrometry.

| Sample | G0F | G1F | G2F | G2FS1 | G2FS2 |
|---|---|---|---|---|---|
| 3h56-269-IgG4.1 | 67% | 29% | 4% | | |
| 3h56-269-IgG1.1f | 32% | 58% | 9% | | |
| 3h56-269-IgG1.3f | 42% | 55% | 3% | | |
| 3h56-269-IgG1- | 4% | 37% | 43% | 13% | 2% |
| D265A | | | | | |
| 1F4-IgG1f | 68% | 32% | | | |
| 1F4-IgG1.3f | 26% | 64% | 10% | | |
| 1F4-D265A | 27% | 40% | 27% | 4% | 2% |

[0469] The mass spectrometry data for the control antibodies 1F4-IgG1f and 1F4-IgG1.3f, as well as for dAb-Fc antibodies 3h56-269-IgG4.1, 3h56-269-IgG1.1f, 3h56-269-IgG1.3f, showed that these proteins consist of a typical mixture of G0F, G1F glycoforms, with a lower abundance of G2F species.

[0470] Thus, IgG1.3 (heavy chain constant region and Fc) is essentially devoid of binding to CD16, CD32a, CD32b and CD64 and has good biophysical properties. This has also been observed when an IgG1.3 Fc was linked to the variable domain of an anti-TIM3 antibodies (see WO2018/013818). An anti-TIM3 antibody comprising IgG1.3 was shown to have good thermal stability (Tm1=68.1° C., Tm2=80.3° C., Tm3=82.6° C.) and thermal reversibility (95.6% at 74° C., 25.5% at 80° C.), which suggests that the molecule retains its structural integrity under thermal stress and has robust refolding properties when stress is released.

### Example 16: Additional Characteristics of Modified Heavy Chain Constant Regions

[0471] FcR binding and ADCC, ADCP and CDC functions were tested for the heavy chain constant domain variants IgG1.3f, IgG1f-P238K (PK), IgG1f-L235E-P238K (LE-PK), IgG1f-L235E-P238K-K322A (LE-PK-KA), IgG1.3-P238K (IgG1.3-PK), IgG1.3-P238K-K322A (IgG1.3-PK-KA) and IgG2-P238K (IgG2-PK).

[0472] The results indicate that, regarding FcR binding, P238K knocks out all low affinity FcgR binding, whereas hIgG1.3f retains some weak binding to low affinity FcgRs. Adding a L235E mutation to P238K reduces CD64 binding 1000 fold. K322A has no impact on FcgR binding, as the mutation is to reduce C1q binding. Adding the two mutations L234A+G237A to PK or PK-KA further reduces CD64 binding.

[0473] Regarding effector functions, the results indicate that IgG1.3f, IgG1f-P238K (PK), IgG1f-L235E-P238K (LE-PK), IgG1f-L235E-P238K-K322A (LE-PK-KA), IgG1.3-P238K (IgG1.3-PK), IgG1.3-P238K-K322A (IgG1.3-PK-KA) and IgG2-P238K (IgG2-PK) lack ADCC, ADCP and CDC functions.

[0474] In addition, all these isotypes demonstrated acceptable analytical/biophysical properties, as shown in Table 33.

TABLE 33
Characteristics of modified heavy chain constant regions

| | | | | | LE- | LE-PK- | IgG1.3- | IgG1.3- | | IgG2- |
|---|---|---|---|---|---|---|---|---|---|---|
| | Sample | IgG1 | IgG1.3 | PK | PK | KA | PK | PK-KA | IgG2 | PK |
| Yield | Yield | 320 | 301 | 269 | 328 | 269 | 274 | 412 | 433 | 299 |
| | (mg/L) | | | | | | | | | |
| SEC | RT of main | 8.4 | 8.3 | 8.4 | 8.4 | 8.4 | 8.4 | 8.4 | 8.4 | 8.4 |
| | % HMW | 1.3 | 0.0 | 0.2 | 1.3 | 0.3 | 0.3 | 0.2 | 1.2 | 5.3 |
| | % Main | 98.7 | 100.0 | 99.8 | 98.7 | 99.7 | 99.8 | 99.8 | 98.8 | 94.7 |
| | % LMW | 0.0 | 0.0 | 0.0 | 0.0 | 0.0 | 0.0 | 0.0 | 0.0 | 0.0 |
| HIC | RT of main | 10.4 | 10.4 | 10.4 | 10.4 | 10.4 | 10.4 | 10.1 | 10.0 | 10.1 |
| | % Pre-peak | 0.0 | 0.0 | 0.0 | 0.0 | 0.0 | 0.0 | 0.0 | 0.0 | 0.0 |
| | % Main | 100.0 | 100.0 | 100.0 | 100.0 | 100.0 | 100.0 | 100.0 | 70.5 | 70.0 |
| | % Post- | 0.0 | 0.0 | 0.0 | 0.0 | 0.0 | 0.0 | 0.0 | 29.6 | 30.0 |
| | peak | | | | | | | | | |
| DLS | Rh (nm) | 5.2 | 5.2 | 4.8 | 5.2 | 4.8 | 4.8 | 4.8 | 4.8 | 6.1 |
| | % Pd | 19.4 | 13.5 | 18.7 | 31.1 | 18.6 | 18.0 | 12.3 | 26.9 | 23.3 |
| | % Mass | 97.9 | 100.0 | 100.0 | 98.1 | 100.0 | 100.0 | 100.0 | 100.0 | 97.6 |
| icIEF | pI main | 9.3 | 9.3 | 9.3 | 9.3 | 9.2 | 9.3 | 9.2 | 9.0 | 9.1 |
| | % Acidic | 17.3 | 17.4 | 27.3 | 24.6 | 25.1 | 30.3 | 28.4 | 13.1 | 15.7 |
| | % Main | 80.8 | 78.7 | 72.7 | 70.9 | 71.1 | 68.4 | 67.5 | 64.1 | 67.6 |
| | % Basic | 2.0 | 3.9 | 0.0 | 4.5 | 3.7 | 1.3 | 4.1 | 22.9 | 16.7 |
| | #peaks | 4 | 3 | 3 | 3 | 5 | 5 | 4 | 5 | 3 |
| Uncle | Tm1 (° C.) | 73.0 | 69.5 | 65.6 | 63.0 | 60.6 | 63.0 | 60.0 | 71.3 | 64.5 |
| Tm/Tagg | Tagg 266 | 77.8 | 81.4 | 81.2 | 76.9 | 80.6 | 80.5 | 80.7 | 76.9 | 76.6 |
| | (° C.) | | | | | | | | | |
| DSC | Tm1 (° C.) | 70.7 | 68.2 | 65.4 | 62.5 | 60.8 | 62.9 | 60.9 | 72.6 | 64.7 |
| | #peaks | 3.0 | 3.0 | 3.0 | 3.0 | 3.0 | 3.0 | 3.0 | 5.0 | 5.0 |

The results indicate that all isotypes demonstrate acceptable analytical/biophysical properties and that Tm1 (CH2 domain) is the clearest differentiator for analytical/biophysical properties.

SEQUENCE TABLE 34

| SEQ | | |
|---|---|---|
| ID | | |
| NO | Description | Sequence |
| 1 | Full-length IgG1 wild-type | ASTKGPSVFPLAPSSKSTSGGTAALGCLVKDYFPEPVTVSWNSG |
| | | ALTSGVHTFPAVLQSSGLYSLSSVVTVPSSSLGTQTYICNVNHKP |
| | | SNTKVDKKVEPKSCDKTHTCPPCPAPELLGGPSVFLFPPKPKDTL |
| | | MISRTPEVTCVVVDVSHEDPEVKFNWYVDGVEVHNAKTKPREE |
| | | QYNSTYRVVSVLTVLHQDWLNGKEYKCKVSNKALPAPIEKTISK |
| | | AKGQPREPQVYTLPPSREEMTKNQVSLTCLVKGFYPSDIAVEWE |
| | | SNGQPENNYKTTPPVLDSDGSFFLYSKLTVDKSRWQQGNVFSCS |
| | | VMHEALHNHYTQKSLSLSPGK |
| 2 | CH1 IgG1 wild-type | ASTKGPSVFPLAPSSKSTSGGTAALGCLVKDYFPEPVTVSWNSG |
| | | ALTSGVHTFPAVLQSSGLYSLSSVVTVPSSSLGTQTYICNVNHKP |
| | | SNTKVDKKV |
| 3 | Hinge IgG1 wild-type | EPKSCDKTHTCPPCPAPELLGG |
| 4 | CH2 IgG1 wild-type | PSVFLFPPKPKDTLMISRTPEVTCVVVDVSHEDPEVKFNWYVDG |
| | | VEVHNAKTKPREEQYNSTYRVVSVLTVLHQDWLNGKEYKCKV |
| | | SNKALPAPIEKTISKAK |
| 5 | CH3 IgG1 wild-type | GQPREPQVYTLPPSREEMTKNQVSLTCLVKGFYPSDIAVEWESN |
| | | GQPENNYKTTPPVLDSDGSFFLYSKLTVDKSRWQQGNVFSCSV |
| | | MHEALHNHYTQKSLSLSPGK |
| 6 | Full-length IgG2 wild-type | ASTKGPSVFPLAPCSRSTSESTAALGCLVKDYFPEPVTVSWNSGA |
| | | LTSGVHTFPAVLQSSGLYSLSSVVTVPSSNFGTQTYTCNVDHKPS |
| | | NTKVDKTVERKCCVECPPCPAPPVAGPSVFLFPPKPKDTLMISRT |
| | | PEVTCVVVDVSHEDPEVQFNWYVDGVEVHNAKTKPREEQFNST |
| | | FRVVSVLTVVHQDWLNGKEYKCKVSNKGLPAPIEKTISKTKGQP |
| | | REPQVYTLPPSREEMTKNQVSLTCLVKGFYPSDIAVEWESNGQP |
| | | ENNYKTTPPMLDSDGSFFLYSKLTVDKSRWQQGNVFSCSVMHE |
| | | ALHNHYTQKSLSLSPGK |
| 7 | CH1 IgG2 wild-type | ASTKGPSVFPLAPCSRSTSESTAALGCLVKDYFPEPVTVSWNSGA |
| | | LTSGVHTFPAVLQSSGLYSLSSVVTVPSSNFGTQTYTCNVDHKPS |
| | | NTKVDKTV |
| 8 | Hinge IgG2 wild-type | ERKCCVECPPCPAPPVAG |
| 9 | CH2 IgG2 wild-type | PSVFLFPPKPKDTLMISRTPEVTCVVVDVSHEDPEVQFNWYVDG |
| | | VEVHNAKTKPREEQFNSTFRVVSVLTVVHQDWLNGKEYKCKVS |
| | | NKGLPAPIEKTISKTK |
| 10 | CH3 IgG2 wild-type | GQPREPQVYTLPPSREEMTKNQVSLTCLVKGFYPSDIAVEWESN |
| | | GQPENNYKTTPPMLDSDGSFFLYSKLTVDKSRWQQGNVFSCSV |
| | | MHEALHNHYTQKSLSLSPGK |
| 11 | Full-length IgG3 wild-type | ASTKGPSVFPLAPCSRSTSGGTAALGCLVKDYFPEPVTVSWNSG |
| | | ALTSGVHTFPAVLQSSGLYSLSSVVTVPSSSLGTQTYTCNVNHKP |
| | | SNTKVDKRVELKTPLGDTTHTCPRCPEPKSCDTPPPCPRCPEPKS |
| | | CDTPPPCPRCPEPKSCDTPPPCPRCPAPELLGGPSVFLFPPKPKDT |
| | | LMISRTPEVTCVVVDVSHEDPEVQFKWYVDGVEVHNAKTKPRE |
| | | EQYNSTFRVVSVLTVLHQDWLNGKEYKCKVSNKALPAPIEKTIS |
| | | KTKGQPREPQVYTLPPSREEMTKNQVSLTCLVKGFYPSDIAVEW |
| | | ESSGQPENNYNTTPPMLDSDGSFFLYSKLTVDKSRWQQGNIFSC |
| | | SVMHEALHNRFTQKSLSLSPGK |
| 12 | CH1 IgG3 wild-type | ASTKGPSVFPLAPCSRSTSGGTAALGCLVKDYFPEPVTVSWNSG |
| | | ALTSGVHTFPAVLQSSGLYSLSSVVTVPSSSLGTQTYTCNVNHKP |
| | | SNTKVDKRV |
| 13 | Hinge IgG3 wild-type | ELKTPLGDTTHTCPRCPE |
| 14 | CH2 IgG3 wild-type | PKSCDTPPPCPRCPEPKSCDTPPPCPRCPEPKSCDTPPPCPRCPAPE |
| | | LLGGPSVFLFPPKPKDTLMISRTPEVTCVVVDVSHEDPEVQFKW |
| | | YVDGVEVHNAKTKPREEQYNSTFRVVSVLTVLHQDWLNGKEY |
| | | KCKVSNKALPAPIEKTISKTK |
| 15 | CH3 IgG3 wild-type | GQPREPQVYTLPPSREEMTKNQVSLTCLVKGFYPSDIAVEWESS |
| | | GQPENNYNTTPPMLDSDGSFFLYSKLTVDKSRWQQGNIFSCSVM |
| | | HEALHNRFTQKSLSLSPGK |
| 16 | Full-length IgG4 wild-type | ASTKGPSVFPLAPCSRSTSESTAALGCLVKDYFPEPVTVSWNSGA |
| | | LTSGVHTFPAVLQSSGLYSLSSVVTVPSSSLGTKTYTCNVDHKPS |
| | | NTKVDKRVESKYGPPCPSCPAPEFLGGPSVFLFPPKPKDTLMISR |
| | | TPEVTCVVVDVSQEDPEVQFNWYVDGVEVHNAKTKPREEQFNS |
| | | TYRVVSVLTVLHQDWLNGKEYKCKVSNKGLPSSIEKTISKAKGQ |
| | | PREPQVYTLPPSQEEMTKNQVSLTCLVKGFYPSDIAVEWESNGQ |
| | | PENNYKTTPPVLDSDGSFFLYSRLTVDKSRWQEGNVFSCSVMHE |
| | | ALHNHYTQKSLSLSLGK |
| 17 | CH1 IgG4 wild-type | ASTKGPSVFPLAPCSRSTSESTAALGCLVKDYFPEPVTVSWNSGA |
| | | LTSGVHTFPAVLQSSGLYSLSSVVTVPSSSLGTKTYTCNVDHKPS |
| | | NTKVDKRV |
| 18 | Hinge IgG4 wild-type | ESKYGPPCPSCPAPEFLGG |
| 19 | CH2 IgG4 wild-type | PSVFLFPPKPKDTLMISRTPEVTCVVVDVSQEDPEVQFNWYVDG |
| | | VEVHNAKTKPREEQFNSTYRVVSVLTVLHQDWLNGKEYKCKV |
| | | SNKGLPSSIEKTISKAK |
| 20 | CH3 IgG4 wild-type | GQPREPQVYTLPPSQEEMTKNQVSLTCLVKGFYPSDIAVEWESN |
| | | GQPENNYKTTPPVLDSDGSFFLYSRLTVDKSRWQEGNVFSCSVM |
| | | HEALHNHYTQKSLSLSLGK |
| 21 | Modified IgG2 Hinge (C219S) | ERKSCVECPPCPAPPVAG |
| 22 | IgG2/IgG1 hybrid hinge | ERKCCVECPPCPAPELLGG |
| 23 | IgG2 C219S/IgG1 hybrid hinge | ERKSCVECPPCPAPELLGG |
| 24 | Modified CH2 IgG1 | PSVFLFPPKPKDTLMISRTPEVTCVVVDVSHEDPEVKFNWYVDG |
| | (A330S/P331S) | VEVHNAKTKPREEQYNSTYRVVSVLTVLHQDWLNGKEYKCKV |
| | | SNKALPSSIEKTISKAK |
| 25 | IgG1.1 Hinge | EPKSCDKTHTCPPCPAPEAEGA |
| | (L234A/L235E/G237A) | |
| 26 | IgG1-IgG2-IgG1 | ASTKGPSVFPLAPSSKSTSGGTAALGCLVKDYFPEPVTVSWNSG |
| | (IgG1-IgG2/IgG1(SEQ#22)- | ALTSGVHTFPAVLQSSGLYSLSSVVTVPSSSLGTQTYICNVNHKP |
| | IgG1-IgG1) | SNTKVDKKVERKCCVECPPCPAPELLGGPSVFLFPPKPKDTLMIS |
| | | RTPEVTCVVVDVSHEDPEVKFNWYVDGVEVHNAKTKPREEQY |
| | | NSTYRVVSVLTVLHQDWLNGKEYKCKVSNKALPAPIEKTISKAK |
| | | GQPREPQVYTLPPSREEMTKNQVSLTCLVKGFYPSDIAVEWESN |
| | | GQPENNYKTTPPVLDSDGSFFLYSKLTVDKSRWQQGNVFSCSV |
| | | MHEALHNHYTQKSLSLSPG |
| 27 | IgG1-IgG2-IgG12 | ASTKGPSVFPLAPSSKSTSGGTAALGCLVKDYFPEPVTVSWNSG |
| | (IgG1-IgG2(SEQ#8)-IgG1- | ALTSGVHTFPAVLQSSGLYSLSSVVTVPSSSLGTQTYICNVNHKP |
| | IgG1) | SNTKVDKKVERKCCVECPPCPAPPVAGPSVFLFPPKPKDTLMISR |
| | | TPEVTCVVVDVSHEDPEVKFNWYVDGVEVHNAKTKPREEQYN |
| | | STYRVVSVLTVLHQDWLNGKEYKCKVSNKALPAPIEKTISKAKG |
| | | QPREPQVYTLPPSREEMTKNQVSLTCLVKGFYPSDIAVEWESNG |
| | | QPENNYKTTPPVLDSDGSFFLYSKLTVDKSRWQQGNVFSCSVM |
| | | HEALHNHYTQKSLSLSPG |
| 28 | IgG2-IgG1 | ASTKGPSVFPLAPCSRSTSESTAALGCLVKDYFPEPVTVSWNSGA |
| | (IgG2-IgG2/IgG1(SEQ#22)- | LTSGVHTFPAVLQSSGLYSLSSVVTVPSSNFGTQTYTCNVDHKPS |
| | IgG1-IgG1) | NTKVDKTVERKCCVECPPCPAPELLGGPSVFLFPPKPKDTLMISR |
| | | TPEVTCVVVDVSHEDPEVKFNWYVDGVEVHNAKTKPREEQYN |
| | | STYRVVSVLTVLHQDWLNGKEYKCKVSNKALPAPIEKTISKAKG |
| | | QPREPQVYTLPPSREEMTKNQVSLTCLVKGFYPSDIAVEWESNG |
| | | QPENNYKTTPPVLDSDGSFFLYSKLTVDKSRWQQGNVFSCSVM |
| | | HEALHNHYTQKSLSLSPG |
| 29 | IgG2-IgG12 | ASTKGPSVFPLAPCSRSTSESTAALGCLVKDYFPEPVTVSWNSGA |
| | (IgG2-IgG2(SEQ#8)-IgG1- | LTSGVHTFPAVLQSSGLYSLSSVVTVPSSNFGTQTYTCNVDHKPS |
| | IgG1) | NTKVDKTVERKCCVECPPCPAPPVAGPSVFLFPPKPKDTLMISRT |
| | | PEVTCVVVDVSHEDPEVKFNWYVDGVEVHNAKTKPREEQYNS |
| | | TYRVVSVLTVLHQDWLNGKEYKCKVSNKALPAPIEKTISKAKG |
| | | QPREPQVYTLPPSREEMTKNQVSLTCLVKGFYPSDIAVEWESNG |
| | | QPENNYKTTPPVLDSDGSFFLYSKLTVDKSRWQQGNVFSCSVM |
| | | HEALHNHYTQKSLSLSPG |
| 30 | IgG1-IgG2-IgG1.1 | ASTKGPSVFPLAPSSKSTSGGTAALGCLVKDYFPEPVTVSWNSG |
| | (IgG1-IgG2(SEQ#8)- | ALTSGVHTFPAVLQSSGLYSLSSVVTVPSSSLGTQTYICNVNHKP |
| | IgG1(A330S/P331S)-IgG1) | SNTKVDKKVERKCCVECPPCPAPPVAGPSVFLFPPKPKDTLMISR |
| | | TPEVTCVVVDVSHEDPEVKFNWYVDGVEVHNAKTKPREEQYN |
| | | STYRVVSVLTVLHQDWLNGKEYKCKVSNKALPSSIEKTISKAKG |
| | | QPREPQVYTLPPSREEMTKNQVSLTCLVKGFYPSDIAVEWESNG |
| | | QPENNYKTTPPVLDSDGSFFLYSKLTVDKSRWQQGNVFSCSVM |
| | | HEALHNHYTQKSLSLSPG |
| 31 | IgG2-IgG1.1 | ASTKGPSVFPLAPCSRSTSESTAALGCLVKDYFPEPVTVSWNSGA |
| | (IgG2-IgG2(SEQ#8)- | LTSGVHTFPAVLQSSGLYSLSSVVTVPSSNFGTQTYTCNVDHKPS |
| | IgG1(A330S/P331S)-IgG1) | NTKVDKTVERKCCVECPPCPAPPVAGPSVFLFPPKPKDTLMISRT |
| | | PEVTCVVVDVSHEDPEVKFNWYVDGVEVHNAKTKPREEQYNS |
| | | TYRVVSVLTVLHQDWLNGKEYKCKVSNKALPSSIEKTISKAKGQ |
| | | PREPQVYTLPPSREEMTKNQVSLTCLVKGFYPSDIAVEWESNGQ |
| | | PENNYKTTPPVLDSDGSFFLYSKLTVDKSRWQQGNVFSCSVMH |
| | | EALHNHYTQKSLSLSPGK |
| 32 | IgG1-IgG2CS-IgG1 | ASTKGPSVFPLAPSSKSTSGGTAALGCLVKDYFPEPVTVSWNSG |
| | (IgG1-IgG2(C219S)-IgG1- | ALTSGVHTFPAVLQSSGLYSLSSVVTVPSSSLGTQTYICNVNHKP |
| | IgG1) | SNTKVDKKVERKSCVECPPCPAPPVAGPSVFLFPPKPKDTLMISR |
| | | TPEVTCVVVDVSHEDPEVKFNWYVDGVEVHNAKTKPREEQYN |
| | | STYRVVSVLTVLHQDWLNGKEYKCKVSNKALPAPIEKTISKAKG |
| | | QPREPQVYTLPPSREEMTKNQVSLTCLVKGFYPSDIAVEWESNG |
| | | QPENNYKTTPPVLDSDGSFFLYSKLTVDKSRWQQGNVFSCSVM |
| | | HEALHNHYTQKSLSLSPG |
| 33 | IgG1-IgG2CS-IgG12 | ASTKGPSVFPLAPSSKSTSGGTAALGCLVKDYFPEPVTVSWNSG |
| | (IgG1-IgG2(C219S)-IgG1- | ALTSGVHTFPAVLQSSGLYSLSSVVTVPSSSLGTQTYICNVNHKP |
| | IgG1) | SNTKVDKKVERKSCVECPPCPAPPVAGPSVFLFPPKPKDTLMISR |
| | | TPEVTCVVVDVSHEDPEVKFNWYVDGVEVHNAKTKPREEQYN |
| | | STYRVVSVLTVLHQDWLNGKEYKCKVSNKALPAPIEKTISKAKG |
| | | QPREPQVYTLPPSREEMTKNQVSLTCLVKGFYPSDIAVEWESNG |
| | | QPENNYKTTPPVLDSDGSFFLYSKLTVDKSRWQQGNVFSCSVM |
| | | HEALHNHYTQKSLSLSPG |
| 34 | IgG2CS-IgG1 | ASTKGPSVFPLAPCSRSTSESTAALGCLVKDYFPEPVTVSWNSGA |
| | (IgG2-IgG2(C219S)-IgG1- | LTSGVHTFPAVLQSSGLYSLSSVVTVPSSNFGTQTYTCNVDHKPS |
| | IgG1) | NTKVDKTVERKSCVECPPCPAPPVAGPSVFLFPPKPKDTLMISRT |
| | | PEVTCVVVDVSHEDPEVKFNWYVDGVEVHNAKTKPREEQYNS |
| | | TYRVVSVLTVLHQDWLNGKEYKCKVSNKALPAPIEKTISKAKG |
| | | QPREPQVYTLPPSREEMTKNQVSLTCLVKGFYPSDIAVEWESNG |
| | | QPENNYKTTPPVLDSDGSFFLYSKLTVDKSRWQQGNVFSCSVM |
| | | HEALHNHYTQKSLSLSPG |
| 35 | IgG2CS-IgG12 | ASTKGPSVFPLAPCSRSTSESTAALGCLVKDYFPEPVTVSWNSGA |
| | (IgG2-IgG2(C219S)-IgG1- | LTSGVHTFPAVLQSSGLYSLSSVVTVPSSNFGTQTYTCNVDHKPS |
| | IgG1) | NTKVDKTVERKSCVECPPCPAPPVAGPSVFLFPPKPKDTLMISRT |
| | | PEVTCVVVDVSHEDPEVKFNWYVDGVEVHNAKTKPREEQYNS |
| | | TYRVVSVLTVLHQDWLNGKEYKCKVSNKALPAPIEKTISKAKG |
| | | QPREPQVYTLPPSREEMTKNQVSLTCLVKGFYPSDIAVEWESNG |
| | | QPENNYKTTPPVLDSDGSFFLYSKLTVDKSRWQQGNVFSCSVM |
| | | HEALHNHYTQKSLSLSPG |
| 36 | IgG1-IgG2CS-IgG1.1 | ASTKGPSVFPLAPSSKSTSGGTAALGCLVKDYFPEPVTVSWNSG |
| | (IgG1-IgG2(C219S)- | ALTSGVHTFPAVLQSSGLYSLSSVVTVPSSSLGTQTYICNVNHKP |
| | IgG1(A330S/P331S)-IgG1) | SNTKVDKKVERKSCVECPPCPAPPVAGPSVFLFPPKPKDTLMISR |
| | | TPEVTCVVVDVSHEDPEVKFNWYVDGVEVHNAKTKPREEQYN |
| | | STYRVVSVLTVLHQDWLNGKEYKCKVSNKALPSSIEKTISKAKG |
| | | QPREPQVYTLPPSREEMTKNQVSLTCLVKGFYPSDIAVEWESNG |
| | | QPENNYKTTPPVLDSDGSFFLYSKLTVDKSRWQQGNVFSCSVM |
| | | HEALHNHYTQKSLSLSPG |
| 37 | IgG2CS-IgG1.1 | ASTKGPSVFPLAPCSRSTSESTAALGCLVKDYFPEPVTVSWNSGA |
| | (IgG2-IgG2(C219S)- | LTSGVHTFPAVLQSSGLYSLSSVVTVPSSNFGTQTYTCNVDHKPS |
| | IgG1(A330S/P331S)-IgG1) | NTKVDKTVERKSCVECPPCPAPPVAGPSVFLFPPKPKDTLMISRT |
| | | PEVTCVVVDVSHEDPEVKFNWYVDGVEVHNAKTKPREEQYNS |
| | | TYRVVSVLTVLHQDWLNGKEYKCKVSNKALPSSIEKTISKAKGQ |
| | | PREPQVYTLPPSREEMTKNQVSLTCLVKGFYPSDIAVEWESNGQ |
| | | PENNYKTTPPVLDSDGSFFLYSKLTVDKSRWQQGNVFSCSVMH |
| | | EALHNHYTQKSLSLSPG |
| 38 | Ab 11F11 VH | QVQLVESGGGVVQPGRSLRLSCATSGFTFSNYGMHWVRQAPGK |
| | | GLEWVAVILYDGSNKYYPDSVKGRFTISRDNSKNTLYLQMNSL |
| | | RAEDTAVYYCARGGSSWYPDSFDIWGQGTMVTVSS |
| 39 | Ab 4C3 VH | EVQLVESGGGLVQPGRSLRLSCAASGFTFDDYAMHWVRQAPGK |
| | | GLEWVSGISWKSGSIGYADSVKGRFTISRDNAKNSLYLQMNSLR |
| | | AEDTALYYCVKGYYVILTGLDYWGQGTLVTVSS |
| 40 | Ab CD73.10 VH | QVQLVESGGGVVQPGRSLRLSCAASGFTFSNYGMHWVRQAPG |
| | | KGLEWVAVIWYDESNKYYPDSVKGRFTISRDNSKNTLYLQMNS |
| | | LRAEDTAVYYCARGGSSWYPDSFDIWGQGTMVTVSS |
| 41 | Ab CD73.3 VH (4C3/V94A) | EVQLVESGGGLVQPGRSLRLSCAASGFTFDDYAMHWVRQAPGK |
| | | GLEWVSGISWKSGSIGYADSVKGRFTISRDNAKNSLYLQMNSLR |
| | | AEDTVLYYCVKGYYVILTGLDYWGQGTLVTVSS |
| 42 | Ab 6E11 VH | EVQLVESGGALVQPGRSLRLSCAASGFTFDDYAMHWVRQAPGK |
| | | GLEWVSGITWNSGGIGYADSVKGRFTISRDNAKNSLYLQMNSLR |
| | | AEDTALYYCAKDRYYSSWLLFDNWGQGILVTVSS |
| 43 | Ab CD73.4 VH | QVQLVESGGGVVQPGRSLRLSCAASGFTFSNYGMHWVRQAPG |
| | | KGLEWVAVILYDGSNKYYPDSVKGRFTISRDNSKNTLYLQMNS |
| | | LRAEDTAVYYCARGGSSWYPDSFDIWGQGTMVTVSS |
| 44 | Ab 11F11 full-length HC | QVQLVESGGGVVQPGRSLRLSCATSGFTFSNYGMHWVRQAPGK |
| | | GLEWVAVILYDGSNKYYPDSVKGRFTISRDNSKNTLYLQMNSL |
| | | RAEDTAVYYCARGGSSWYPDSFDIWGQGTMVTVSSASTKGPSV |
| | | FPLAPCSRSTSESTAALGCLVKDYFPEPVTVSWNSGALTSGVHTF |
| | | PAVLQSSGLYSLSSVVTVPSSNFGTQTYTCNVDHKPSNTKVDKT |
| | | VERKCCVECPPCPAPPVAGPSVFLFPPKPKDTLMISRTPEVTCVV |
| | | VDVSHEDPEVQFNWYVDGVEVHNAKTKPREEQFNSTFRVVSVL |
| | | TVVHQDWLNGKEYKCKVSNKGLPAPIEKTISKTKGQPREPQVYT |
| | | LPPSREEMTKNQVSLTCLVKGFYPSDIAVEWESNGQPENNYKTT |
| | | PPMLDSDGSFFLYSKLTVDKSRWQQGNVFSCSVMHEALHNHYT |
| | | QKSLSLSPGK |
| 45 | Ab 4C3 full-length HC | EVQLVESGGGLVQPGRSLRLSCAASGFTFDDYAMHWVRQAPGK |
| | | GLEWVSGISWKSGSIGYADSVKGRFTISRDNAKNSLYLQMNSLR |
| | | AEDTALYYCVKGYYVILTGLDYWGQGTLVTVSSASTKGPSVFP |
| | | LAPSSKSTSGGTAALGCLVKDYFPEPVTVSWNSGALTSGVHTFP |
| | | AVLQSSGLYSLSSVVTVPSSSLGTQTYICNVNHKPSNTKVDKKV |
| | | EPKSCDKTHTCPPCPAPELLGGPSVFLFPPKPKDTLMISRTPEVTC |
| | | VVVDVSHEDPEVKFNWYVDGVEVHNAKTKPREEQYNSTYRVV |
| | | SVLTVLHQDWLNGKEYKCKVSNKALPAPIEKTISKAKGQPREPQ |
| | | VYTLPPSRDELTKNQVSLTCLVKGFYPSDIAVEWESNGQPENNY |
| | | KTTPPVLDSDGSFFLYSKLTVDKSRWQQGNVFSCSVMHEALHN |
| | | HYTQKSLSLSPGK |
| 46 | Ab 6E11 full-length HC | EVQLVESGGALVQPGRSLRLSCAASGFTFDDYAMHWVRQAPGK |
| | | GLEWVSGITWNSGGIGYADSVKGRFTISRDNAKNSLYLQMNSLR |
| | | AEDTALYYCAKDRYYSSWLLFDNWGQGILVTVSSASTKGPSVF |
| | | PLAPSSKSTSGGTAALGCLVKDYFPEPVTVSWNSGALTSGVHTF |
| | | PAVLQSSGLYSLSSVVTVPSSSLGTQTYICNVNHKPSNTKVDKK |
| | | VEPKSCDKTHTCPPCPAPELLGGPSVFLFPPKPKDTLMISRTPEVT |
| | | CVVVDVSHEDPEVKFNWYVDGVEVHNAKTKPREEQYNSTYRV |
| | | VSVLTVLHQDWLNGKEYKCKVSNKALPAPIEKTISKAKGQPREP |
| | | QVYTLPPSRDELTKNQVSLTCLVKGFYPSDIAVEWESNGQPENN |
| | | YKTTPPVLDSDGSFFLYSKLTVDKSRWQQGNVFSCSVMHEALH |
| | | NHYTQKSLSLSPGK |
| 47 | Ab CD73.10-IgG2-C219S full- | QVQLVESGGGVVQPGRSLRLSCAASGFTFSNYGMHWVRQAPG |
| | length HC | KGLEWVAVIWYDESNKYYPDSVKGRFTISRDNSKNTLYLQMNS |
| | | LRAEDTAVYYCARGGSSWYPDSFDIWGQGTMVTVSSASTKGPS |
| | | VFPLAPCSRSTSESTAALGCLVKDYFPEPVTVSWNSGALTSGVH |
| | | TFPAVLQSSGLYSLSSVVTVPSSNFGTQTYTCNVDHKPSNTKVD |
| | | KTVERKSCVECPPCPAPPVAGPSVFLFPPKPKDTLMISRTPEVTC |
| | | VVVDVSHEDPEVQFNWYVDGVEVHNAKTKPREEQFNSTFRVVS |
| | | VLTVVHQDWLNGKEYKCKVSNKGLPAPIEKTISKTKGQPREPQV |
| | | YTLPPSREEMTKNQVSLTCLVKGFYPSDIAVEWESNGQPENNYK |
| | | TTPPMLDSDGSFFLYSKLTVDKSRWQQGNVFSCSVMHEALHNH |
| | | YTQKSLSLSPG |
| 48 | Ab CD73.10-IgG2-C219S- | QVQLVESGGGVVQPGRSLRLSCAASGFTFSNYGMHWVRQAPG |
| | IgG1.1 full-length HC | KGLEWVAVIWYDESNKYYPDSVKGRFTISRDNSKNTLYLQMNS |
| | | LRAEDTAVYYCARGGSSWYPDSFDIWGQGTMVTVSSASTKGPS |
| | | VFPLAPCSRSTSESTAALGCLVKDYFPEPVTVSWNSGALTSGVH |
| | | TFPAVLQSSGLYSLSSVVTVPSSNFGTQTYTCNVDHKPSNTKVD |
| | | KTVERKSCVECPPCPAPPVAGPSVFLFPPKPKDTLMISRTPEVTC |
| | | VVVDVSHEDPEVKFNWYVDGVEVHNAKTKPREEQYNSTYRVV |
| | | SVLTVLHQDWLNGKEYKCKVSNKALPSSIEKTISKAKGQPREPQ |
| | | VYTLPPSREEMTKNQVSLTCLVKGFYPSDIAVEWESNGQPENNY |
| | | KTTPPMLDSDGSFFLYSKLTVDKSRWQQGNVFSCSVMHEALHN |
| | | HYTQKSLSLSPG |
| 49 | Ab CD73.10-IgG1.1 full-length | QVQLVESGGGVVQPGRSLRLSCAASGFTFSNYGMHWVRQAPG |
| | HC | KGLEWVAVIWYDESNKYYPDSVKGRFTISRDNSKNTLYLQMNS |
| | (IgG1.1- | LRAEDTAVYYCARGGSSWYPDSFDIWGQGTMVTVSSASTKGPS |
| | IgG1.1(L234A/L235E/G237A)- | VFPLAPSSKSTSGGTAALGCLVKDYFPEPVTVSWNSGALTSGVH |
| | IgG1.1(A330S/P331S)-IgG1.1) | TFPAVLQSSGLYSLSSVVTVPSSSLGTQTYICNVNHKPSNTKVDK |
| | | KVEPKSCDKTHTCPPCPAPEAEGAPSVFLFPPKPKDTLMISRTPE |
| | | VTCVVVDVSHEDPEVKFNWYVDGVEVHNAKTKPREEQYNSTY |
| | | RVVSVLTVLHQDWLNGKEYKCKVSNKALPSSIEKTISKAKGQPR |
| | | EPQVYTLPPSREEMTKNQVSLTCLVKGFYPSDIAVEWESNGQPE |
| | | NNYKTTPPVLDSDGSFFLYSKLTVDKSRWQQGNVFSCSVMHEA |
| | | LHNHYTQKSLSLSPG |
| 50 | Ab CD73.4-IgG2-C219S full- | QVQLVESGGGVVQPGRSLRLSCAASGFTFSNYGMHWVRQAPG |
| | length HC | KGLEWVAVILYDGSNKYYPDSVKGRFTISRDNSKNTLYLQMNS |
| | | LRAEDTAVYYCARGGSSWYPDSFDIWGQGTMVTVSSASTKGPS |
| | | VFPLAPCSRSTSESTAALGCLVKDYFPEPVTVSWNSGALTSGVH |
| | | TFPAVLQSSGLYSLSSVVTVPSSNFGTQTYTCNVDHKPSNTKVD |
| | | KTVERKSCVECPPCPAPPVAGPSVFLFPPKPKDTLMISRTPEVTC |
| | | VVVDVSHEDPEVQFNWYVDGVEVHNAKTKPREEQFNSTFRVVS |
| | | VLTVVHQDWLNGKEYKCKVSNKGLPAPIEKTISKTKGQPREPQV |
| | | YTLPPSREEMTKNQVSLTCLVKGFYPSDIAVEWESNGQPENNYK |
| | | TTPPMLDSDGSFFLYSKLTVDKSRWQQGNVFSCSVMHEALHNH |
| | | YTQKSLSLSPG |
| 51 | Ab CD73.3-IgG1.1 full-length | EVQLVESGGGLVQPGRSLRLSCAASGFTFDDYAMHWVRQAPGK |
| | HC | GLEWVSGISWKSGSIGYADSVKGRFTISRDNAKNSLYLQMNSLR |
| | (IgG1.1- | AEDTVLYYCVKGYYVILTGLDYWGQGTLVTVSSASTKGPSVFP |
| | IgG1.1(L234A/L235E/G237A)- | LAPSSKSTSGGTAALGCLVKDYFPEPVTVSWNSGALTSGVHTFP |
| | IgG1.1(A330S/P331S)-IgG1.1) | AVLQSSGLYSLSSVVTVPSSSLGTQTYICNVNHKPSNTKVDKKV |
| | | EPKSCDKTHTCPPCPAPEAEGAPSVFLFPPKPKDTLMISRTPEVTC |
| | | VVVDVSHEDPEVKFNWYVDGVEVHNAKTKPREEQYNSTYRVV |
| | | SVLTVLHQDWLNGKEYKCKVSNKALPSSIEKTISKAKGQPREPQ |
| | | VYTLPPSREEMTKNQVSLTCLVKGFYPSDIAVEWESNGQPENNY |
| | | KTTPPVLDSDGSFFLYSKLTVDKSRWQQGNVFSCSVMHEALHN |
| | | HYTQKSLSLSPG |
| 52 | Full-length heavy chain | ASTKGPSVFPLAPCSRSTSESTAALGCLVKDYFPEPVTVSWNSGA |
| | constant region IgG2-IgG2- | LTSGVHTFPAVLQSSGLYSLSSVVTVPSSNFGTQTYTCNVDHKPS |
| | IgG2-IgG2 | NTKVDKTVERKCCVECPPCPAPPVAGPSVFLFPPKPKDTLMISRT |
| | | PEVTCVVVDVSHEDPEVQFNWYVDGVEVHNAKTKPREEQFNST |
| | | FRVVSVLTVVHQDWLNGKEYKCKVSNKGLPAPIEKTISKTKGQP |
| | | REPQVYTLPPSREEMTKNQVSLTCLVKGFYPSDIAVEWESNGQP |
| | | ENNYKTTPPMLDSDGSFFLYSKLTVDKSRWQQGNVFSCSVMHE |
| | | ALHNHYTQKSLSLSPGK |
| 53 | Full-length heavy chain | ASTKGPSVFPLAPSSKSTSGGTAALGCLVKDYFPEPVTVSWNSG |
| | constant region IgG1-IgG1- | ALTSGVHTFPAVLQSSGLYSLSSVVTVPSSSLGTQTYICNVNHKP |
| | IgG1-IgG1 | SNTKVDKKVEPKSCDKTHTCPPCPAPELLGGPSVFLFPPKPKDTL |
| | | MISRTPEVTCVVVDVSHEDPEVKFNWYVDGVEVHNAKTKPREE |
| | | QYNSTYRVVSVLTVLHQDWLNGKEYKCKVSNKALPAPIEKTISK |
| | | AKGQPREPQVYTLPPSREEMTKNQVSLTCLVKGFYPSDIAVEWE |
| | | SNGQPENNYKTTPPVLDSDGSFFLYSKLTVDKSRWQQGNVFSCS |
| | | VMHEALHNHYTQKSLSLSPGK |
| 54 | Full-length heavy chain | ASTKGPSVFPLAPSSKSTSGGTAALGCLVKDYFPEPVTVSWNSG |
| | constant region IgG1- | ALTSGVHTFPAVLQSSGLYSLSSVVTVPSSSLGTQTYICNVNHKP |
| | IgG1.1(L234A/L235E/G237A)- | SNTKVDKKVEPKSCDKTHTCPPCPAPEAEGAPSVFLFPPKPKDTL |
| | IgG1.1 (A330S/P331S)-IgG1 | MISRTPEVTCVVVDVSHEDPEVKFNWYVDGVEVHNAKTKPREE |
| | | QYNSTYRVVSVLTVLHQDWLNGKEYKCKVSNKALPSSIEKTISK |
| | | AKGQPREPQVYTLPPSREEMTKNQVSLTCLVKGFYPSDIAVEWE |
| | | SNGQPENNYKTTPPVLDSDGSFFLYSKLTVDKSRWQQGNVFSCS |
| | | VMHEALHNHYTQKSLSLSPG |
| 55 | Full-length heavy chain | ASTKGPSVFPLAPCSRSTSESTAALGCLVKDYFPEPVTVSWNSGA |
| | constant region IgG2- | LTSGVHTFPAVLQSSGLYSLSSVVTVPSSNFGTQTYTCNVDHKPS |
| | IgG2/IgG1 hybrid-IgG1-IgG1 | NTKVDKTVERKCCVECPPCPAPELLGGPSVFLFPPKPKDTLMISR |
| | | TPEVTCVVVDVSHEDPEVKFNWYVDGVEVHNAKTKPREEQYN |
| | | STYRVVSVLTVLHQDWLNGKEYKCKVSNKALPAPIEKTISKAKG |
| | | QPREPQVYTLPPSREEMTKNQVSLTCLVKGFYPSDIAVEWESNG |
| | | QPENNYKTTPPVLDSDGSFFLYSKLTVDKSRWQQGNVFSCSVM |
| | | HEALHNHYTQKSLSLSPG |
| 56 | Full-length heavy chain | ASTKGPSVFPLAPCSRSTSESTAALGCLVKDYFPEPVTVSWNSGA |
| | constant region IgG2-IgG2- | LTSGVHTFPAVLQSSGLYSLSSVVTVPSSNFGTQTYTCNVDHKPS |
| | IgG1.1(A330/P331S)-IgG1 | NTKVDKTVERKCCVECPPCPAPPVAGPSVFLFPPKPKDTLMISRT |
| | | PEVTCVVVDVSHEDPEVKFNWYVDGVEVHNAKTKPREEQYNS |
| | | TYRVVSVLTVLHQDWLNGKEYKCKVSNKALPSSIEKTISKAKGQ |
| | | PREPQVYTLPPSREEMTKNQVSLTCLVKGFYPSDIAVEWESNGQ |
| | | PENNYKTTPPVLDSDGSFFLYSKLTVDKSRWQQGNVFSCSVMH |
| | | EALHNHYTQKSLSLSPG |
| 57 | Table 2 - hinge domain | VDKRV |
| 58 | Table 2 - hinge domain | VDKTV |
| 59 | Table 2 - hinge domain | EPKSCDKTHT |
| 60 | Table 2 - hinge domain | ERK |
| 61 | Table 2 - hinge domain | ELKTPLGDTTHT |
| 62 | Table 2 - hinge domain | EPKS |
| 63 | Table 2 - hinge domain | ESKYGPP |
| 64 | Table 2 - hinge domain | CPPCP |
| 65 | Table 2 - hinge domain | CCVECPPCP |
| 66 | Table 2 - hinge domain | CPRCP |
| 67 | TABLE 2 - hinge domain | EPKSCDTPPPCPRCP |
| 68 | Table 2 - hinge domain | CDTPPPCPRCP |
| 69 | Table 2 - hinge domain | CPSCP |
| 70 | Table 2 - hinge domain | APELLGG |
| 71 | Table 2 - hinge domain | APPVAG |
| 72 | Light chain 11F11 | DIQMTQSPSSLSASVGDRVTITCRASQGISSWLAWYQQKPEKAP |
| | | KSLIYAASSLQSGVPSRFSGSGSGTDFTLTISSLQPEDFATYYCQQ |
| | | YNSYPLTFGGGTKVEIKRTVAAPSVFIFPPSDEQLKSGTASVVCL |
| | | LNNFYPREAKVQWKVDNALQSGNSQESVTEQDSKDSTYSLSST |
| | | LTLSKADYEKHKVYACEVTHQGLSSPVTKSFNRGEC |
| 73 | Light chain 4C3 | EIVLTQSPGTLSLSPGERATLSCRASQSVSSYLAWYQQKPGQAPR |
| | | LLIYGASSRATGIPDRFSGSGSGTDFTLTISRLEPEDFAVYYCQQY |
| | | GSSPLTFGGGTKVEIKRTVAAPSVFIFPPSDEQLKSGTASVVCLLN |
| | | NFYPREAKVQWKVDNALQSGNSQESVTEQDSKDSTYSLSSTLTL |
| | | SKADYEKHKVYACEVTHQGLSSPVTKSFNRGEC |
| 74 | Light chain 6D11 | EIVLTQSPGTLSLSPGERATLSCRASQSVSSSYLAWYQQKPGQAP |
| | | RLLIYGASSRATGIPDRFSGSGSGTDFTLTISRLEPEDFAVYYCQH |
| | | YGSSFTFGPGTKVDIKRTVAAPSVFIFPPSDEQLKSGTASVVCLLN |
| | | NFYPREAKVQWKVDNALQSGNSQESVTEQDSKDSTYSLSSTLTL |
| | | SKADYEKHKVYACEVTHQGLSSPVTKSFNRGEC |
| 75 | Anti-GITR AbVH | QVQLVESGGGVVQPGRSLRLSCAASGFTFSSYGMHWVRQAPGK |
| | | GLEWVAVIWYEGSNKYYADSVKGRFTISRDNSKNTLYLQMNSL |
| | | RAEDTAVYYCARGGSMVRGDYYYGMDVWGQGTTVTVSS |
| 76 | Anti-GITR Ab VL | AIQLTQSPSSLSASVGDRVTITCRASQGISSALAWYQQKPGKAPK |
| | | LLIYDASSLESGVPSRFSGSGSGTDFTLTISSLQPEDFATYYCQQF |
| | | NSYPYTFGQGTKLEIK |
| 77 | Anti-GITR Ab LC | AIQLTQSPSSLSASVGDRVTITCRASQGISSALAWYQQKPGKAPK |
| | | LLIYDASSLESGVPSRFSGSGSGTDFTLTISSLQPEDFATYYCQQF |
| | | NSYPYTFGQGTKLEIKRTVAAPSVFIFPPSDEQLKSGTASVVCLL |
| | | NNFYPREAKVQWKVDNALQSGNSQESVTEQDSKDSTYSLSSTL |
| | | TLSKADYEKHKVYACEVTHQGLSSPVTKSFNRGEC |
| 78 | IgG1f | ASTKGPSVFPLAPSSKSTSGGTAALGCLVKDYFPEPVTVSWNSG |
| | | ALTSGVHTFPAVLQSSGLYSLSSVVTVPSSSLGTQTYICNVNHKP |
| | | SNTKVDKRVEPKSCDKTHTCPPCPAPELLGGPSVFLFPPKPKDTL |
| | | MISRTPEVTCVVVDVSHEDPEVKFNWYVDGVEVHNAKTKPREE |
| | | QYNSTYRVVSVLTVLHQDWLNGKEYKCKVSNKALPAPIEKTISK |
| | | AKGQPREPQVYTLPPSREEMTKNQVSLTCLVKGFYPSDIAVEWE |
| | | SNGQPENNYKTTPPVLDSDGSFFLYSKLTVDKSRWQQGNVFSCS |
| | | VMHEALHNHYTQKSLSLSPGK |
| 79 | IgG2.3 | ASTKGPSVFPLAPCSRSTSESTAALGCLVKDYFPEPVTVSWNSGA |
| | | LTSGVHTFPAVLQSSGLYSLSSVVTVPSSNFGTQTYTCNVDHKPS |
| | | NTKVDKTVERKSCVECPPCPAPPVAGPSVFLFPPKPKDTLMISRT |
| | | PEVTCVVVDVSHEDPEVQFNWYVDGVEVHNAKTKPREEQFNST |
| | | FRVVSVLTVVHQDWLNGKEYKCKVSNKGLPAPIEKTISKTKGQP |
| | | REPQVYTLPPSREEMTKNQVSLTCLVKGFYPSDIAVEWESNGQP |
| | | ENNYKTTPPMLDSDGSFFLYSKLTVDKSRWQQGNVFSCSVMHE |
| | | ALHNHYTQKSLSLSPGK |
| 80 | IgG2.3G1-AY | ASTKGPSVFPLAPCSRSTSESTAALGCLVKDYFPEPVTVSWNSGA |
| | | LTSGVHTFPAVLQSSGLYSLSSVVTVPSSNFGTQTYTCNVDHKPS |
| | | NTKVDKTVERKSCVECPPCPAPELLGGPSVFLFPPKPKDTLMISR |
| | | TPEVTCVVVDVSHEDPEVKFNWYVDGVEVHNAKTKPREEQYN |
| | | STYRVVSVLTVLHQDWLNGKEYKCKVSNKALPAPIEKTISKAKG |
| | | QPREPQVYTLPPSREEMTKNQVSLTCLVKGFYPSDIAVEWESNG |
| | | QPENNYKTTPPVLDSDGSFFLYSKLTVDKSRWQQGNVFSCSVM |
| | | HEALHNHYTQKSLSLSPGK |
| 81 | IgG2.3G1-KH | ASTKGPSVFPLAPCSRSTSESTAALGCLVKDYFPEPVTVSWNSGA |
| | | LTSGVHTFPAVLQSSGLYSLSSVVTVPSSNFGTQTYTCNVDHKPS |
| | | NTKVDKTVERKSCVECPPCPAPPVAGPSVFLFPPKPKDTLMISRT |
| | | PEVTCVVVDVSHEDPEVKFNWYVDGVEVHNAKTKPREEQYNS |
| | | TYRVVSVLTVLHQDWLNGKEYKCKVSNKALPAPIEKTISKAKG |
| | | QPREPQVYTLPPSREEMTKNQVSLTCLVKGFYPSDIAVEWESNG |
| | | QPENNYKTTPPVLDSDGSFFLYSKLTVDKSRWQQGNVFSCSVM |
| | | HEALHNHYTQKSLSLSPGK |
| 82 | IgG2.5 | ASTKGPSVFPLAPSSRSTSESTAALGCLVKDYFPEPVTVSWNSGA |
| | | LTSGVHTFPAVLQSSGLYSLSSVVTVPSSNFGTQTYTCNVDHKPS |
| | | NTKVDKTVERKCCVECPPCPAPPVAGPSVFLFPPKPKDTLMISRT |
| | | PEVTCVVVDVSHEDPEVQFNWYVDGVEVHNAKTKPREEQFNST |
| | | FRVVSVLTVVHQDWLNGKEYKCKVSNKGLPAPIEKTISKTKGQP |
| | | REPQVYTLPPSREEMTKNQVSLTCLVKGFYPSDIAVEWESNGQP |
| | | ENNYKTTPPMLDSDGSFFLYSKLTVDKSRWQQGNVFSCSVMHE |
| | | ALHNHYTQKSLSLSPGK |
| 83 | IgG1.1f | ASTKGPSVFPLAPSSKSTSGGTAALGCLVKDYFPEPVTVSWNSG |
| | | ALTSGVHTFPAVLQSSGLYSLSSVVTVPSSSLGTQTYICNVNHKP |
| | | SNTKVDKRVEPKSCDKTHTCPPCPAPEAEGAPSVFLFPPKPKDTL |
| | | MISRTPEVTCVVVDVSHEDPEVKFNWYVDGVEVHNAKTKPREE |
| | | QYNSTYRVVSVLTVLHQDWLNGKEYKCKVSNKALPSSIEKTISK |
| | | AKGQPREPQVYTLPPSREEMTKNQVSLTCLVKGFYPSDIAVEWE |
| | | SNGQPENNYKTTPPVLDSDGSFFLYSKLTVDKSRWQQGNVFSCS |
| | | VMHEALHNHYTQKSLSLSPGK |
| 84 | IgG2.3G1.1f-KH | ASTKGPSVFPLAPCSRSTSESTAALGCLVKDYFPEPVTVSWNSGA |
| | | LTSGVHTFPAVLQSSGLYSLSSVVTVPSSNFGTQTYTCNVDHKPS |
| | | NTKVDKTVERKSCVECPPCPAPPVAGPSVFLFPPKPKDTLMISRT |
| | | PEVTCVVVDVSHEDPEVKFNWYVDGVEVHNAKTKPREEQYNS |
| | | TYRVVSVLTVLHQDWLNGKEYKCKVSNKALPSSIEKTISKAKGQ |
| | | PREPQVYTLPPSREEMTKNQVSLTCLVKGFYPSDIAVEWESNGQ |
| | | PENNYKTTPPVLDSDGSFFLYSKLTVDKSRWQQGNVFSCSVMH |
| | | EALHNHYTQKSLSLSPGK |
| 85 | IgG1-deltaTHT | ASTKGPSVFPLAPSSKSTSGGTAALGCLVKDYFPEPVTVSWNSG |
| | | ALTSGVHTFPAVLQSSGLYSLSSVVTVPSSSLGTQTYICNVNHKP |
| | | SNTKVDKRVEPKSCDKCPPCPAPELLGGPSVFLFPPKPKDTLMIS |
| | | RTPEVTCVVVDVSHEDPEVKFNWYVDGVEVHNAKTKPREEQY |
| | | NSTYRVVSVLTVLHQDWLNGKEYKCKVSNKALPAPIEKTISKAK |
| | | GQPREPQVYTLPPSREEMTKNQVSLTCLVKGFYPSDIAVEWESN |
| | | GQPENNYKTTPPVLDSDGSFFLYSKLTVDKSRWQQGNVFSCSV |
| | | MHEALHNHYTQKSLSLSPGK |
| 86 | IgG2.3-plusTHT | ASTKGPSVFPLAPCSRSTSESTAALGCLVKDYFPEPVTVSWNSGA |
| | | LTSGVHTFPAVLQSSGLYSLSSVVTVPSSNFGTQTYTCNVDHKPS |
| | | NTKVDKTVERKSCVETHTCPPCPAPPVAGPSVFLFPPKPKDTLMI |
| | | SRTPEVTCVVVDVSHEDPEVQFNWYVDGVEVHNAKTKPREEQF |
| | | NSTFRVVSVLTVVHQDWLNGKEYKCKVSNKGLPAPIEKTISKTK |
| | | GQPREPQVYTLPPSREEMTKNQVSLTCLVKGFYPSDIAVEWESN |
| | | GQPENNYKTTPPMLDSDGSFFLYSKLTVDKSRWQQGNVFSCSV |
| | | MHEALHNHYTQKSLSLSPGK |
| 87 | IgG2.3-plusGGG | ASTKGPSVFPLAPCSRSTSESTAALGCLVKDYFPEPVTVSWNSGA |
| | | LTSGVHTFPAVLQSSGLYSLSSVVTVPSSNFGTQTYTCNVDHKPS |
| | | NTKVDKTVERKSCVEGGGCPPCPAPPVAGPSVFLFPPKPKDTLMI |
| | | SRTPEVTCVVVDVSHEDPEVQFNWYVDGVEVHNAKTKPREEQF |
| | | NSTFRVVSVLTVVHQDWLNGKEYKCKVSNKGLPAPIEKTISKTK |
| | | GQPREPQVYTLPPSREEMTKNQVSLTCLVKGFYPSDIAVEWESN |
| | | GQPENNYKTTPPMLDSDGSFFLYSKLTVDKSRWQQGNVFSCSV |
| | | MHEALHNHYTQKSLSLSPGK |
| 88 | IgG2.5G1.1f-KH | ASTKGPSVFPLAPSSRSTSESTAALGCLVKDYFPEPVTVSWNSGA |
| | | LTSGVHTFPAVLQSSGLYSLSSVVTVPSSNFGTQTYTCNVDHKPS |
| | | NTKVDKTVERKCCVECPPCPAPPVAGPSVFLFPPKPKDTLMISRT |
| | | PEVTCVVVDVSHEDPEVKFNWYVDGVEVHNAKTKPREEQYNS |
| | | TYRVVSVLTVLHQDWLNGKEYKCKVSNKALPSSIEKTISKAKGQ |
| | | PREPQVYTLPPSREEMTKNQVSLTCLVKGFYPSDIAVEWESNGQ |
| | | PENNYKTTPPVLDSDGSFFLYSKLTVDKSRWQQGNVFSCSVMH |
| | | EALHNHYTQKSLSLSPGK |
| 89 | IgG2.5G1-AY | ASTKGPSVFPLAPSSRSTSESTAALGCLVKDYFPEPVTVSWNSGA |
| | | LTSGVHTFPAVLQSSGLYSLSSVVTVPSSNFGTQTYTCNVDHKPS |
| | | NTKVDKTVERKCCVECPPCPAPELLGGPSVFLFPPKPKDTLMISR |
| | | TPEVTCVVVDVSHEDPEVKFNWYVDGVEVHNAKTKPREEQYN |
| | | STYRVVSVLTVLHQDWLNGKEYKCKVSNKALPAPIEKTISKAKG |
| | | QPREPQVYTLPPSREEMTKNQVSLTCLVKGFYPSDIAVEWESNG |
| | | QPENNYKTTPPVLDSDGSFFLYSKLTVDKSRWQQGNVFSCSVM |
| | | HEALHNHYTQKSLSLSPGK |
| 90 | IgG2.5G1-KH | ASTKGPSVFPLAPSSRSTSESTAALGCLVKDYFPEPVTVSWNSGA |
| | | LTSGVHTFPAVLQSSGLYSLSSVVTVPSSNFGTQTYTCNVDHKPS |
| | | NTKVDKTVERKCCVECPPCPAPPVAGPSVFLFPPKPKDTLMISRT |
| | | PEVTCVVVDVSHEDPEVKFNWYVDGVEVHNAKTKPREEQYNS |
| | | TYRVVSVLTVLHQDWLNGKEYKCKVSNKALPAPIEKTISKAKG |
| | | QPREPQVYTLPPSREEMTKNQVSLTCLVKGFYPSDIAVEWESNG |
| | | QPENNYKTTPPVLDSDGSFFLYSKLTVDKSRWQQGNVFSCSVM |
| | | HEALHNHYTQKSLSLSPGK |
| 91 | IgG2.5-plusTHT | ASTKGPSVFPLAPSSRSTSESTAALGCLVKDYFPEPVTVSWNSGA |
| | | LTSGVHTFPAVLQSSGLYSLSSVVTVPSSNFGTQTYTCNVDHKPS |
| | | NTKVDKTVERKCCVETHTCPPCPAPPVAGPSVFLFPPKPKDTLMI |
| | | SRTPEVTCVVVDVSHEDPEVQFNWYVDGVEVHNAKTKPREEQF |
| | | NSTFRVVSVLTVVHQDWLNGKEYKCKVSNKGLPAPIEKTISKTK |
| | | GQPREPQVYTLPPSREEMTKNQVSLTCLVKGFYPSDIAVEWESN |
| | | GQPENNYKTTPPMLDSDGSFFLYSKLTVDKSRWQQGNVFSCSV |
| | | MHEALHNHYTQKSLSLSPGK |
| 92 | IgG1-G2.3G1-AY | ASTKGPSVFPLAPSSKSTSGGTAALGCLVKDYFPEPVTVSWNSG |
| | | ALTSGVHTFPAVLQSSGLYSLSSVVTVPSSSLGTQTYICNVNHKP |
| | | SNTKVDKRVERKSCVECPPCPAPELLGGPSVFLFPPKPKDTLMIS |
| | | RTPEVTCVVVDVSHEDPEVKFNWYVDGVEVHNAKTKPREEQY |
| | | NSTYRVVSVLTVLHQDWLNGKEYKCKVSNKALPAPIEKTISKAK |
| | | GQPREPQVYTLPPSREEMTKNQVSLTCLVKGFYPSDIAVEWESN |
| | | GQPENNYKTTPPVLDSDGSFFLYSKLTVDKSRWQQGNVFSCSV |
| | | MHEALHNHYTQKSLSLSPGK |
| 93 | IgG1-G2.3G1-KH | ASTKGPSVFPLAPSSKSTSGGTAALGCLVKDYFPEPVTVSWNSG |
| | | ALTSGVHTFPAVLQSSGLYSLSSVVTVPSSSLGTQTYICNVNHKP |
| | | SNTKVDKRVERKSCVECPPCPAPPVAGPSVFLFPPKPKDTLMISR |
| | | TPEVTCVVVDVSHEDPEVKFNWYVDGVEVHNAKTKPREEQYN |
| | | STYRVVSVLTVLHQDWLNGKEYKCKVSNKALPAPIEKTISKAKG |
| | | QPREPQVYTLPPSREEMTKNQVSLTCLVKGFYPSDIAVEWESNG |
| | | QPENNYKTTPPVLDSDGSFFLYSKLTVDKSRWQQGNVFSCSVM |
| | | HEALHNHYTQKSLSLSPGK |
| 94 | G2-G1-G1-G1 | ASTKGPSVFPLAPCSRSTSESTAALGCLVKDYFPEPVTVSWNSGA |
| | | LTSGV |
| | | HTFPAVLQSSGLYSLSSVVTVPSSNFGTQTYTCNVDHKPSNTKV |
| | | DKTVER |
| | | KSCDKTHTCPPCPAPELLGGPSVFLFPPKPKDTLMISRTPEVTCV |
| | | VVDVS |
| | | HEDPEVKFNWYVDGVEVHNAKTKPREEQYNSTYRVVSVLTVL |
| | | HQDWLNGK |
| | | EYKCKVSNKALPAPIEKTISKAKGQPREPQVYTLPPSREEMTKNQ |
| | | VSLTC |
| | | LVKGFYPSDIAVEWESNGQPENNYKTTPPVLDSDGSFFLYSKLT |
| | | VDKSRW |
| | | QQGNVFSCSVMHEALHNHYTQKSLSLSPGK |
| 95 | G2.5-G1-G1-G1 | ASTKGPSVFPLAPSSRSTSESTAALGCLVKDYFPEPVTVSWNSGA |
| | | LTSGV |
| | | HTFPAVLQSSGLYSLSSVVTVPSSNFGTQTYTCNVDHKPSNTKV |
| | | DKTVER |
| | | KSCDKTHTCPPCPAPELLGGPSVFLFPPKPKDTLMISRTPEVTCV |
| | | VVDVS |
| | | HEDPEVKFNWYVDGVEVHNAKTKPREEQYNSTYRVVSVLTVL |
| | | HQDWLNGK |
| | | EYKCKVSNKALPAPIEKTISKAKGQPREPQVYTLPPSREEMTKNQ |
| | | VSLTC |
| | | LVKGFYPSDIAVEWESNGQPENNYKTTPPVLDSDGSFFLYSKLT |
| | | VDKSRW |
| | | QQGNVFSCSVMHEALHNHYTQKSLSLSPGK |
| 96 | G1-G2.3-G2-G2 | ASTKGPSVFPLAPSSKSTSGGTAALGCLVKDYFPEPVTVSWNSG |
| | | ALTSGV |
| | | HTFPAVLQSSGLYSLSSVVTVPSSSLGTQTYICNVNHKPSNTKVD |
| | | KRVEP |
| | | KSCVECPPCPAPPVAGPSVFLFPPKPKDTLMISRTPEVTCVVVDV |
| | | S |
| | | HEDPEVQFNWYVDGVEVHNAKTKPREEQFNSTFRVVSVLTVVH |
| | | QDWLNGK |
| | | EYKCKVSNKGLPAPIEKTISKTKGQPREPQVYTLPPSREEMTKNQ |
| | | VSLTC |
| | | LVKGFYPSDIAVEWESNGQPENNYKTTPPMLDSDGSFFLYSKLT |
| | | VDKSRW |
| | | QQGNVFSCSVMHEALHNHYTQKSLSLSPGK |
| 97 | G1-KRGEGSSNLF | ASTKGPSVFPLAPSSRSTSESTAALGCLVKDYFPEPVTVSWNSGA |
| | | LTSGV |
| | | HTFPAVLQSSGLYSLSSVVTVPSSNFGTQTYICNVNHKPSNTKVD |
| | | KRVEP |
| | | KSCDKTHTCPPCPAPELLGGPSVFLFPPKPKDTLMISRTPEVTCV |
| | | VVDVS |
| | | HEDPEVKFNWYVDGVEVHNAKTKPREEQYNSTYRVVSVLTVL |
| | | HQDWLNGK |
| | | EYKCKVSNKALPAPIEKTISKAKGQPREPQVYTLPPSREEMTKNQ |
| | | VSLTC |
| | | LVKGFYPSDIAVEWESNGQPENNYKTTPPVLDSDGSFFLYSKLT |
| | | VDKSRW |
| | | QQGNVFSCSVMHEALHNHYTQKSLSLSPGK |
| 98 | G1-KRGEGS | ASTKGPSVFPLAPSSRSTSESTAALGCLVKDYFPEPVTVSWNSGA |
| | | LTSGV |
| | | HTFPAVLQSSGLYSLSSVVTVPSSSLGTQTYICNVNHKPSNTKVD |
| | | KRVEP |
| | | KSCDKTHTCPPCPAPELLGGPSVFLFPPKPKDTLMISRTPEVTCV |
| | | VVDVS |
| | | HEDPEVKFNWYVDGVEVHNAKTKPREEQYNSTYRVVSVLTVL |
| | | HQDWLNGK |
| | | EYKCKVSNKALPAPIEKTISKAKGQPREPQVYTLPPSREEMTKNQ |
| | | VSLTC |
| | | LVKGFYPSDIAVEWESNGQPENNYKTTPPVLDSDGSFFLYSKLT |
| | | VDKSRW |
| | | QQGNVFSCSVMHEALHNHYTQKSLSLSPGK |
| 99 | G1-SNLF | ASTKGPSVFPLAPSSKSTSGGTAALGCLVKDYFPEPVTVSWNSG |
| | | ALTSGV |
| | | HTFPAVLQSSGLYSLSSVVTVPSSNFGTQTYICNVNHKPSNTKVD |
| | | KRVEP |
| | | KSCDKTHTCPPCPAPELLGGPSVFLFPPKPKDTLMISRTPEVTCV |
| | | VVDVS |
| | | HEDPEVKFNWYVDGVEVHNAKTKPREEQYNSTYRVVSVLTVL |
| | | HQDWLNGK |
| | | EYKCKVSNKALPAPIEKTISKAKGQPREPQVYTLPPSREEMTKNQ |
| | | VSLTC |
| | | LVKGFYPSDIAVEWESNGQPENNYKTTPPVLDSDGSFFLYSKLT |
| | | VDKSRW |
| | | QQGNVFSCSVMHEALHNHYTQKSLSLSPGK |
| 100 | IgG1-ITNDRTPR | ASTKGPSVFPLAPSSKSTSGGTAALGCLVKDYFPEPVTVSWNSG |
| | | ALTSGV |
| | | HTFPAVLQSSGLYSLSSVVTVPSSSLGTQTYTCNVDHKPSNTKV |
| | | DKTVER |
| | | KSCDKTHTCPPCPAPELLGGPSVFLFPPKPKDTLMISRTPEVTCV |
| | | VVDVS |
| | | HEDPEVKFNWYVDGVEVHNAKTKPREEQYNSTYRVVSVLTVL |
| | | HQDWLNGK |
| | | EYKCKVSNKALPAPIEKTISKAKGQPREPQVYTLPPSREEMTKNQ |
| | | VSLTC |
| | | LVKGFYPSDIAVEWESNGQPENNYKTTPPVLDSDGSFFLYSKLT |
| | | VDKSRW |
| | | QQGNVFSCSVMHEALHNHYTQKSLSLSPGK |
| 101 | G1-SNLFPR | ASTKGPSVFPLAPSSKSTSGGTAALGCLVKDYFPEPVTVSWNSG |
| | | ALTSGV |
| | | HTFPAVLQSSGLYSLSSVVTVPSSNFGTQTYICNVNHKPSNTKVD |
| | | KRVER |
| | | KSCDKTHTCPPCPAPELLGGPSVFLFPPKPKDTLMISRTPEVTCV |
| | | VVDVS |
| | | HEDPEVKFNWYVDGVEVHNAKTKPREEQYNSTYRVVSVLTVL |
| | | HQDWLNGK |
| | | EYKCKVSNKALPAPIEKTISKAKGQPREPQVYTLPPSREEMTKNQ |
| | | VSLTC |
| | | LVKGFYPSDIAVEWESNGQPENNYKTTPPVLDSDGSFFLYSKLT |
| | | VDKSRW |
| | | QQGNVFSCSVMHEALHNHYTQKSLSLSPG |
| 102 | G2-RKEGSGNSFL | ASTKGPSVFPLAPCSKSTSGGTAALGCLVKDYFPEPVTVSWNSG |
| | | ALTSGV |
| | | HTFPAVLQSSGLYSLSSVVTVPSSSLGTQTYTCNVDHKPSNTKV |
| | | DKTVER |
| | | KSCVECPPCPAPPVAGPSVFLFPPKPKDTLMISRTPEVTCVVVDV |
| | | S |
| | | HEDPEVQFNWYVDGVEVHNAKTKPREEQFNSTFRVVSVLTVVH |
| | | QDWLNGK |
| | | EYKCKVSNKGLPAPIEKTISKTKGQPREPQVYTLPPSREEMTKNQ |
| | | VSLTC |
| | | LVKGFYPSDIAVEWESNGQPENNYKTTPPMLDSDGSFFLYSKLT |
| | | VDKSRW |
| | | QQGNVFSCSVMHEALHNHYTQKSLSLSPGK |
| 103 | G2-RKEGSG | ASTKGPSVFPLAPCSKSTSGGTAALGCLVKDYFPEPVTVSWNSG |
| | | ALTSGV |
| | | HTFPAVLQSSGLYSLSSVVTVPSSNFGTQTYTCNVDHKPSNTKV |
| | | DKTVER |
| | | KSCVECPPCPAPPVAGPSVFLFPPKPKDTLMISRTPEVTCVVVDV |
| | | S |
| | | HEDPEVQFNWYVDGVEVHNAKTKPREEQFNSTFRVVSVLTVVH |
| | | QDWLNGK |
| | | EYKCKVSNKGLPAPIEKTISKTKGQPREPQVYTLPPSREEMTKNQ |
| | | VSLTC |
| | | LVKGFYPSDIAVEWESNGQPENNYKTTPPMLDSDGSFFLYSKLT |
| | | VDKSRW |
| | | QQGNVFSCSVMHEALHNHYTQKSLSLSPGK |
| 104 | G2-NSFL | ASTKGPSVFPLAPCSRSTSESTAALGCLVKDYFPEPVTVSWNSGA |
| | | LTSGV |
| | | HTFPAVLQSSGLYSLSSVVTVPSSSLGTQTYTCNVDHKPSNTKV |
| | | DKTVER |
| | | KSCVECPPCPAPPVAGPSVFLFPPKPKDTLMISRTPEVTCVVVDV |
| | | S |
| | | HEDPEVQFNWYVDGVEVHNAKTKPREEQFNSTFRVVSVLTVVH |
| | | QDWLNGK |
| | | EYKCKVSNKGLPAPIEKTISKTKGQPREPQVYTLPPSREEMTKNQ |
| | | VSLTC |
| | | LVKGFYPSDIAVEWESNGQPENNYKTTPPMLDSDGSFFLYSKLT |
| | | VDKSRW |
| | | QQGNVFSCSVMHEALHNHYTQKSLSLSPGK |
| 105 | IgG2-TIDNTRRP | ASTKGPSVFPLAPCSRSTSESTAALGCLVKDYFPEPVTVSWNSGA |
| | | LTSGV |
| | | HTFPAVLQSSGLYSLSSVVTVPSSNFGTQTYICNVNHKPSNTKVD |
| | | KRVEP |
| | | KSCVECPPCPAPPVAGPSVFLFPPKPKDTLMISRTPEVTCVVVDV |
| | | S |
| | | HEDPEVQFNWYVDGVEVHNAKTKPREEQFNSTFRVVSVLTVVH |
| | | QDWLNGK |
| | | EYKCKVSNKGLPAPIEKTISKTKGQPREPQVYTLPPSREEMTKNQ |
| | | VSLTC |
| | | LVKGFYPSDIAVEWESNGQPENNYKTTPPMLDSDGSFFLYSKLT |
| | | VDKSRW |
| | | QQGNVFSCSVMHEALHNHYTQKSLSLSPGK |
| 106 | G2-NSFLRP | ASTKGPSVFPLAPCSRSTSESTAALGCLVKDYFPEPVTVSWNSGA |
| | | LTSGV |
| | | HTFPAVLQSSGLYSLSSVVTVPSSSLGTQTYTCNVDHKPSNTKV |
| | | DKTVEP |
| | | KSCVECPPCPAPPVAGPSVFLFPPKPKDTLMISRTPEVTCVVVDV |
| | | S |
| | | HEDPEVQFNWYVDGVEVHNAKTKPREEQFNSTFRVVSVLTVVH |
| | | QDWLNGK |
| | | EYKCKVSNKGLPAPIEKTISKTKGQPREPQVYTLPPSREEMTKNQ |
| | | VSLTC |
| | | LVKGFYPSDIAVEWESNGQPENNYKTTPPMLDSDGSFFLYSKLT |
| | | VDKSRW |
| | | QQGNVFSCSVMHEALHNHYTQKSLSLSPGK |
| 107 | G1-G1-G2-G1-AY | ASTKGPSVFPLAPSSKSTSGGTAALGCLVKDYFPEPVTVSWNSG |
| | | ALTSGV |
| | | HTFPAVLQSSGLYSLSSVVTVPSSSLGTQTYICNVNHKPSNTKVD |
| | | KRVEP |
| | | KSCDKTHTCPPCPAPELLGGPSVFLFPPKPKDTLMISRTPEVTCV |
| | | VVDVS |
| | | HEDPEVQFNWYVDGVEVHNAKTKPREEQFNSTFRVVSVLTVVH |
| | | QDWLNGK |
| | | EYKCKVSNKGLPAPIEKTISKTKGQPREPQVYTLPPSREEMTKNQ |
| | | VSLTC |
| | | LVKGFYPSDIAVEWESNGQPENNYKTTPPVLDSDGSFFLYSKLT |
| | | VDKSRW |
| | | QQGNVFSCSVMHEALHNHYTQKSLSLSPGK |
| 108 | G1-G1-G2-G1-KH | ASTKGPSVFPLAPSSKSTSGGTAALGCLVKDYFPEPVTVSWNSG |
| | | ALTSGV |
| | | HTFPAVLQSSGLYSLSSVVTVPSSSLGTQTYICNVNHKPSNTKVD |
| | | KRVEP |
| | | KSCDKTHTCPPCPAPPVAGPSVFLFPPKPKDTLMISRTPEVTCVV |
| | | VDVS |
| | | HEDPEVQFNWYVDGVEVHNAKTKPREEQFNSTFRVVSVLTVVH |
| | | QDWLNGK |
| | | EYKCKVSNKGLPAPIEKTISKTKGQPREPQVYTLPPSREEMTKNQ |
| | | VSLTC |
| | | LVKGFYPSDIAVEWESNGQPENNYKTTPPVLDSDGSFFLYSKLT |
| | | VDKSRW |
| | | QQGNVFSCSVMHEALHNHYTQKSLSLSPGK |
| 109 | G2-G2.3-G1-G2-KH | ASTKGPSVFPLAPCSRSTSESTAALGCLVKDYFPEPVTVSWNSGA |
| | | LTSGV |
| | | HTFPAVLQSSGLYSLSSVVTVPSSNFGTQTYTCNVDHKPSNTKV |
| | | DKTVER |
| | | KSCVECPPCPAPPVAGPSVFLFPPKPKDTLMISRTPEVTCVVVDV |
| | | S |
| | | HEDPEVKFNWYVDGVEVHNAKTKPREEQYNSTYRVVSVLTVL |
| | | HQDWLNGK |
| | | EYKCKVSNKALPAPIEKTISKAKGQPREPQVYTLPPSREEMTKNQ |
| | | VSLTC |
| | | LVKGFYPSDIAVEWESNGQPENNYKTTPPMLDSDGSFFLYSKLT |
| | | VDKSRW |
| | | QQGNVFSCSVMHEALHNHYTQKSLSLSPGK |
| 110 | G2.5-G2.3-G1-G2-KH | ASTKGPSVFPLAPSSRSTSESTAALGCLVKDYFPEPVTVSWNSGA |
| | | LTSGV |
| | | HTFPAVLQSSGLYSLSSVVTVPSSNFGTQTYTCNVDHKPSNTKV |
| | | DKTVER |
| | | KSCVECPPCPAPPVAGPSVFLFPPKPKDTLMISRTPEVTCVVVDV |
| | | S |
| | | HEDPEVKFNWYVDGVEVHNAKTKPREEQYNSTYRVVSVLTVL |
| | | HQDWLNGK |
| | | EYKCKVSNKALPAPIEKTISKAKGQPREPQVYTLPPSREEMTKNQ |
| | | VSLTC |
| | | LVKGFYPSDIAVEWESNGQPENNYKTTPPMLDSDGSFFLYSKLT |
| | | VDKSRW |
| | | QQGNVFSCSVMHEALHNHYTQKSLSLSPGK |
| 111 | G2-G2.3-G1-G2-AY | ASTKGPSVFPLAPCSRSTSESTAALGCLVKDYFPEPVTVSWNSGA |
| | | LTSGV |
| | | HTFPAVLQSSGLYSLSSVVTVPSSNFGTQTYTCNVDHKPSNTKV |
| | | DKTVER |
| | | KSCVECPPCPAPELLGGPSVFLFPPKPKDTLMISRTPEVTCVVVD |
| | | VS |
| | | HEDPEVKFNWYVDGVEVHNAKTKPREEQYNSTYRVVSVLTVL |
| | | HQDWLNGK |
| | | EYKCKVSNKALPAPIEKTISKAKGQPREPQVYTLPPSREEMTKNQ |
| | | VSLTC |
| | | LVKGFYPSDIAVEWESNGQPENNYKTTPPMLDSDGSFFLYSKLT |
| | | VDKSRW |
| | | QQGNVFSCSVMHEALHNHYTQKSLSLSPG |
| 112 | G2.5-G2.3-G1-G2-AY | ASTKGPSVFPLAPSSRSTSESTAALGCLVKDYFPEPVTVSWNSGA |
| | | LTSGV |
| | | HTFPAVLQSSGLYSLSSVVTVPSSNFGTQTYTCNVDHKPSNTKV |
| | | DKTVER |
| | | KSCVECPPCPAPELLGGPSVFLFPPKPKDTLMISRTPEVTCVVVD |
| | | VS |
| | | HEDPEVKFNWYVDGVEVHNAKTKPREEQYNSTYRVVSVLTVL |
| | | HQDWLNGK |
| | | EYKCKVSNKALPAPIEKTISKAKGQPREPQVYTLPPSREEMTKNQ |
| | | VSLTC |
| | | LVKGFYPSDIAVEWESNGQPENNYKTTPPMLDSDGSFFLYSKLT |
| | | VDKSRW |
| | | QQGNVFSCSVMHEALHNHYTQKSLSLSPGK |
| 113 | G1-G2.3-G1-G1-KH | ASTKGPSVFPLAPSSKSTSGGTAALGCLVKDYFPEPVTVSWNSG |
| | | ALTSGV |
| | | HTFPAVLQSSGLYSLSSVVTVPSSSLGTQTYICNVNHKPSNTKVD |
| | | KRVEP |
| | | KSCVECPPCPAPPVAGPSVFLFPPKPKDTLMISRTPEVTCVVVDV |
| | | S |
| | | HEDPEVKFNWYVDGVEVHNAKTKPREEQYNSTYRVVSVLTVL |
| | | HQDWLNGK |
| | | EYKCKVSNKALPAPIEKTISKAKGQPREPQVYTLPPSREEMTKNQ |
| | | VSLTC |
| | | LVKGFYPSDIAVEWESNGQPENNYKTTPPVLDSDGSFFLYSKLT |
| | | VDKSRW |
| | | QQGNVFSCSVMHEALHNHYTQKSLSLSPGK |
| 114 | G2-G1-G2-G2-AY | ASTKGPSVFPLAPCSRSTSESTAALGCLVKDYFPEPVTVSWNSGA |
| | | LTSGV |
| | | HTFPAVLQSSGLYSLSSVVTVPSSNFGTQTYTCNVDHKPSNTKV |
| | | DKTVER |
| | | KSCDKTHTCPPCPAPELLGGPSVFLFPPKPKDTLMISRTPEVTCV |
| | | VVDVS |
| | | HEDPEVQFNWYVDGVEVHNAKTKPREEQFNSTFRVVSVLTVVH |
| | | QDWLNGK |
| | | EYKCKVSNKGLPAPIEKTISKTKGQPREPQVYTLPPSREEMTKNQ |
| | | VSLTC |
| | | LVKGFYPSDIAVEWESNGQPENNYKTTPPMLDSDGSFFLYSKLT |
| | | VDKSRW |
| | | QQGNVFSCSVMHEALHNHYTQKSLSLSPGK |
| 115 | G2.5-G1-G2-G2-AY | ASTKGPSVFPLAPSSRSTSESTAALGCLVKDYFPEPVTVSWNSGA |
| | | LTSGV |
| | | HTFPAVLQSSGLYSLSSVVTVPSSNFGTQTYTCNVDHKPSNTKV |
| | | DKTVER |
| | | KSCDKTHTCPPCPAPELLGGPSVFLFPPKPKDTLMISRTPEVTCV |
| | | VVDVS |
| | | HEDPEVQFNWYVDGVEVHNAKTKPREEQFNSTFRVVSVLTVVH |
| | | QDWLNGK |
| | | EYKCKVSNKGLPAPIEKTISKTKGQPREPQVYTLPPSREEMTKNQ |
| | | VSLTC |
| | | LVKGFYPSDIAVEWESNGQPENNYKTTPPMLDSDGSFFLYSKLT |
| | | VDKSRW |
| | | QQGNVFSCSVMHEALHNHYTQKSLSLSPGK |
| 116 | G1-G2-G1-G1-AY | ASTKGPSVFPLAPSSKSTSGGTAALGCLVKDYFPEPVTVSWNSG |
| | | ALTSGV |
| | | HTFPAVLQSSGLYSLSSVVTVPSSSLGTQTYICNVNHKPSNTKVD |
| | | KRVEP |
| | | KSCVECPPCPAPELLGGPSVFLFPPKPKDTLMISRTPEVTCVVVD |
| | | VS |
| | | HEDPEVKFNWYVDGVEVHNAKTKPREEQYNSTYRVVSVLTVL |
| | | HQDWLNGK |
| | | EYKCKVSNKALPAPIEKTISKAKGQPREPQVYTLPPSREEMTKNQ |
| | | VSLTC |
| | | LVKGFYPSDIAVEWESNGQPENNYKTTPPVLDSDGSFFLYSKLT |
| | | VDKSRW |
| | | QQGNVFSCSVMHEALHNHYTQKSLSLSPGK |
| 117 | G2-G1-G2-G2-KH | ASTKGPSVFPLAPCSRSTSESTAALGCLVKDYFPEPVTVSWNSGA |
| | | LTSGV |
| | | HTFPAVLQSSGLYSLSSVVTVPSSNFGTQTYTCNVDHKPSNTKV |
| | | DKTVER |
| | | KSCDKTHTCPPCPAPPVAGPSVFLFPPKPKDTLMISRTPEVTCVV |
| | | VDVS |
| | | HEDPEVQFNWYVDGVEVHNAKTKPREEQFNSTFRVVSVLTVVH |
| | | QDWLNGK |
| | | EYKCKVSNKGLPAPIEKTISKTKGQPREPQVYTLPPSREEMTKNQ |
| | | VSLTC |
| | | LVKGFYPSDIAVEWESNGQPENNYKTTPPMLDSDGSFFLYSKLT |
| | | VDKSRW |
| | | QQGNVFSCSVMHEALHNHYTQKSLSLSPG |
| 118 | G2.5-G1-G2-G2-KH | ASTKGPSVFPLAPSSRSTSESTAALGCLVKDYFPEPVTVSWNSGA |
| | | LTSGV |
| | | HTFPAVLQSSGLYSLSSVVTVPSSNFGTQTYTCNVDHKPSNTKV |
| | | DKTVER |
| | | KSCDKTHTCPPCPAPPVAGPSVFLFPPKPKDTLMISRTPEVTCVV |
| | | VDVS |
| | | HEDPEVQFNWYVDGVEVHNAKTKPREEQFNSTFRVVSVLTVVH |
| | | QDWLNGK |
| | | EYKCKVSNKGLPAPIEKTISKTKGQPREPQVYTLPPSREEMTKNQ |
| | | VSLTC |
| | | LVKGFYPSDIAVEWESNGQPENNYKTTPPMLDSDGSFFLYSKLT |
| | | VDKSRW |
| | | QQGNVFSCSVMHEALHNHYTQKSLSLSPGK |
| 119 | IgG1-deltaHinge | ASTKGPSVFPLAPSSKSTSGGTAALGCLVKDYFPEPVTVSWNSG |
| | | ALTSGV |
| | | HTFPAVLQSSGLYSLSSVVTVPSSSLGTQTYICNVNHKPSNTKVD |
| | | KRVEP |
| | | KCPPCPAPELLGGPSVFLFPPKPKDTLMISRTPEVTCVVVDVS |
| | | HEDPEVKFNWYVDGVEVHNAKTKPREEQYNSTYRVVSVLTVL |
| | | HQDWLNGK |
| | | EYKCKVSNKALPAPIEKTISKAKGQPREPQVYTLPPSREEMTKNQ |
| | | VSLTC |
| | | LVKGFYPSDIAVEWESNGQPENNYKTTPPVLDSDGSFFLYSKLT |
| | | VDKSRW |
| | | QQGNVFSCSVMHEALHNHYTQKSLSLSPGK |
| 120 | IgG2-deltaHinge | ASTKGPSVFPLAPCSRSTSESTAALGCLVKDYFPEPVTVSWNSGA |
| | | LTSGV |
| | | HTFPAVLQSSGLYSLSSVVTVPSSNFGTQTYTCNVDHKPSNTKV |
| | | DKTVER |
| | | KCPPCPAPPVAGPSVFLFPPKPKDTLMISRTPEVTCVVVDVS |
| | | HEDPEVQFNWYVDGVEVHNAKTKPREEQFNSTFRVVSVLTVVH |
| | | QDWLNGK |
| | | EYKCKVSNKGLPAPIEKTISKTKGQPREPQVYTLPPSREEMTKNQ |
| | | VSLTC |
| | | LVKGFYPSDIAVEWESNGQPENNYKTTPPMLDSDGSFFLYSKLT |
| | | VDKSRW |
| | | QQGNVFSCSVMHEALHNHYTQKSLSLSPGK |
| 121 | IgG2.5-deltaHinge | ASTKGPSVFPLAPSSRSTSESTAALGCLVKDYFPEPVTVSWNSGA |
| | | LTSGV |
| | | HTFPAVLQSSGLYSLSSVVTVPSSNFGTQTYTCNVDHKPSNTKV |
| | | DKTVER |
| | | KCPPCPAPPVAGPSVFLFPPKPKDTLMISRTPEVTCVVVDVS |
| | | HEDPEVQFNWYVDGVEVHNAKTKPREEQFNSTFRVVSVLTVVH |
| | | QDWLNGK |
| | | EYKCKVSNKGLPAPIEKTISKTKGQPREPQVYTLPPSREEMTKNQ |
| | | VSLTC |
| | | LVKGFYPSDIAVEWESNGQPENNYKTTPPMLDSDGSFFLYSKLT |
| | | VDKSRW |
| | | QQGNVFSCSVMHEALHNHYTQKSLSLSPGK |
| 122 | IgG1-deltaG237 | ASTKGPSVFPLAPSSKSTSGGTAALGCLVKDYFPEPVTVSWNSG |
| | | ALTSGV |
| | | HTFPAVLQSSGLYSLSSVVTVPSSSLGTQTYICNVNHKPSNTKVD |
| | | KRVEP |
| | | KSCDKTHTCPPCPAPELLGPSVFLFPPKPKDTLMISRTPEVTCVV |
| | | VDVS |
| | | HEDPEVKFNWYVDGVEVHNAKTKPREEQYNSTYRVVSVLTVL |
| | | HQDWLNGK |
| | | EYKCKVSNKALPAPIEKTISKAKGQPREPQVYTLPPSREEMTKNQ |
| | | VSLTC |
| | | LVKGFYPSDIAVEWESNGQPENNYKTTPPVLDSDGSFFLYSKLT |
| | | VDKSRW |
| | | QQGNVFSCSVMHEALHNHYTQKSLSLSPG |
| 123 | IgG2-p1usG237 | ASTKGPSVFPLAPCSRSTSESTAALGCLVKDYFPEPVTVSWNSGA |
| | | LTSGV |
| | | HTFPAVLQSSGLYSLSSVVTVPSSNFGTQTYTCNVDHKPSNTKV |
| | | DKTVER |
| | | KSCVECPPCPAPPVAGGPSVFLFPPKPKDTLMISRTPEVTCVVVD |
| | | VS |
| | | HEDPEVQFNWYVDGVEVHNAKTKPREEQFNSTFRVVSVLTVVH |
| | | QDWLNGK |
| | | EYKCKVSNKGLPAPIEKTISKTKGQPREPQVYTLPPSREEMTKNQ |
| | | VSLTC |
| | | LVKGFYPSDIAVEWESNGQPENNYKTTPPMLDSDGSFFLYSKLT |
| | | VDKSRW |
| | | QQGNVFSCSVMHEALHNHYTQKSLSLSPGK |
| 124 | IgG2.4 | ASTKGP SVFPLAPCSR STSESTAALG |
| | | CLVKDYFPEP VTVSWNSGAL TSGVHTFPAV LQSSGLYSLS |
| | | SVVTVPSSNF |
| | | GTQTYTCNVD HKPSNTKVDK TVERKCSVEC PPCPAPPVAG |
| | | PSVFLFPPKP |
| | | KDTLMISRTP EVTCVVVDVS HEDPEVQFNW YVDGVEVHNA |
| | | KTKPREEQFN |
| | | STFRVVSVLT VVHQDWLNGK EYKCKVSNKG LPAPIEKTIS |
| | | KTKGQPREPQ |
| | | VYTLPPSREE MTKNQVSLTC LVKGFYPSDI AVEWESNGQP |
| | | ENNYKTTPPM |
| | | LDSDGSFFLY SKLTVDKSRW QQGNVFSCSV MHEALHNHYT |
| | | QKSLSLSPGK |
| 125 | IgG2.3/4 | ASTKGP SVFPLAPCSR STSESTAALG |
| | | CLVKDYFPEP VTVSWNSGAL TSGVHTFPAV LQSSGLYSLS |
| | | SVVTVPSSNF |
| | | GTQTYTCNVD HKPSNTKVDK TVERKSSVEC PPCPAPPVAG |
| | | PSVFLFPPKP |
| | | KDTLMISRTP EVTCVVVDVS HEDPEVQFNW YVDGVEVHNA |
| | | KTKPREEQFN |
| | | STFRVVSVLT VVHQDWLNGK EYKCKVSNKG LPAPIEKTIS |
| | | KTKGQPREPQ |
| | | VYTLPPSREE MTKNQVSLTC LVKGFYPSDI AVEWESNGQP |
| | | ENNYKTTPPM |
| | | LDSDGSFFLY SKLTVDKSRW QQGNVFSCSV MHEALHNHYT |
| | | QKSLSLSPGK |
| 126 | Hinge IgG2 C220S | ERKCSVECPPCPAPPVAG |
| 127 | IgG2/IgG1 hybrid hinge C220S | ERKCSVECPPCPAPELLGG |
| 128 | Wildtype IgG2 hinge portion | ERKCCVECPPCPAP |
| 129 | IgG2 hinge portion C219S | ERKSCVECPPCPAP |
| 130 | IgG2 hinge portion C220S | ERKCSVECPPCPAP |
| 131 | IgG2 hinge portion C219X | ERKXCVECPPCPAP |
| 132 | IgG2 hinge portion C220X | ERKCXVECPPCPAP |
| 133 | IgG2 CH1 + IgG2 hinge | ASTKGPSVFPLAPCSRSTSESTAALGCLVKDYFPEPVTVSWNSGA |
| | (wildtype) | LTSGVHTFPAVLQSSGLYSLSSVVTVPSSNFGTQTYTCNVDHKPS |
| | | NTKVDKTVERKCCVECPPCPAPPVAG |
| 134 | IgG2 with C219X | ERKXCVECPPCPAPPVAG |
| 135 | IgG2 with C220X | ERKCXVECPPCPAPPVAG |
| 136 | IgG2/IgG1 hybrid with C219X | ERKXCVECPPCPAPELLGG |
| 137 | IgG2/IgG1 hybrid with C220X | ERKCVECPPCPAPELLGG |
| 138 | IgG2/IgG1 hybrid deltaG | ERKCCVECPPCPAPELLG |
| 139 | IgG2/IgG1 hybrid with C219S | ERKSCVECPPCPAPELLG |
| | deltaG | |
| 140 | IgG2/IgG1 hybrid with C220S | ERKCSVECPPCPAPELLG |
| | deltaG | |
| 141 | IgG2/IgG1 hybrid with C219X | ERKXCVECPPCPAPELLG |
| | deltaG | |
| 142 | IgG2/IgG1 hybrid with C220X | ERKCXVECPPCPAPELLG |
| | deltaG | |
| 143 | Wildtype IgG2 with C-terminal | ERKCCVECPPCPAPPVAGX |
| | X | |
| 144 | IgG2 with C219S with C- | ERKSCVECPPCPAPPVAGX |
| | terminal X | |
| 145 | IgG2 with C220S with C- | ERKCSVECPPCPAPPVAGX |
| | terminal X | |
| 146 | IgG2 with C219X with C- | ERKXCVECPPCPAPPVAGX |
| | terminal X | |
| 147 | IgG2 with C220X with C- | ERKCXVECPPCPAPPVAGX |
| | terminal X | |
| 148 | IgG2 hinge portion | PVAG |
| 149 | IgG1 hinge portion | SCDKTHT |
| 150 | IgG1 hinge portion 1 | ELLG |
| 151 | IgG1 hinge portion 2 | ELLGG |
| 152 | IgG2.3-V13 | ASTKGPSVFPLAPCSRSTSESTAALGCLVKDYFPEPVTVSWNSGA |
| | | LTSGVHTFPAVLQSSGLYSLSSVVTVPSSNFGTQTYTCNVDHKPS |
| | | NTKVDKTVERKSCVECPPCPAPPVAGDSVFLFPPKPKDTLMISRT |
| | | PEVTCVVVDVSHEDPEVQFNWYVDGVEVHNAKTKPREEQFNST |
| | | FRVVSVLTVVHQDWLNGKEYKCKVSNKGLPAPIEKTISKTKGQP |
| | | REPQVYTLPPSREEMTKNQVSLTCLVKGFYPSDIAVEWESNGQP |
| | | ENNYKTTPPMLDSDGSFFLYSKLTVDKSRWQQGNVFSCSVMHE |
| | | ALHNHYTQKSLSLSPGK |
| 153 | IgG2.3-V14 | ASTKGPSVFPLAPCSRSTSESTAALGCLVKDYFPEPVTVSWNSGA |
| | | LTSGVHTFPAVLQSSGLYSLSSVVTVPSSNFGTQTYTCNVDHKPS |
| | | NTKVDKTVERKSCVECPPCPAPPVAGDSVFLFPPKPKDTLMISRT |
| | | PEVTCVVVDVSHEDGEVQFNWYVDGVEVHNAKTKPREEQFNS |
| | | TFRVVSVLTVVHQDWLNGKEYKCKVSNKGLPAPIEKTISKTKGQ |
| | | PREPQVYTLPPSREEMTKNQVSLTCLVKGFYPSDIAVEWESNGQ |
| | | PENNYKTTPPMLDSDGSFFLYSKLTVDKSRWQQGNVFSCSVMH |
| | | EALHNHYTQKSLSLSPGK |
| 154 | IgG2.3-V15 | ASTKGPSVFPLAPCSRSTSESTAALGCLVKDYFPEPVTVSWNSGA |
| | | LTSGVHTFPAVLQSSGLYSLSSVVTVPSSNFGTQTYTCNVDHKPS |
| | | NTKVDKTVERKSCVECPPCPAPPVAGDSVFLFPPKPKDTLMISRT |
| | | PEVTCVVVDVSDEDGEVQFNWYVDGVEVHNAKTKPREEQFNS |
| | | TFRVVSVLTVVHQDWLNGKEYKCKVSNKGLPAPIEKTISKTKGQ |
| | | PREPQVYTLPPSREEMTKNQVSLTCLVKGFYPSDIAVEWESNGQ |
| | | PENNYKTTPPMLDSDGSFFLYSKLTVDKSRWQQGNVFSCSVMH |
| | | EALHNHYTQKSLSLSPGK |
| 155 | IgG2.3-V16 | ASTKGPSVFPLAPCSRSTSESTAALGCLVKDYFPEPVTVSWNSGA |
| | | LTSGVHTFPAVLQSSGLYSLSSVVTVPSSNFGTQTYTCNVDHKPS |
| | | NTKVDKTVERKSCVECPPCPAPPVAGDSVFLFPPKPKDTLMISRT |
| | | PEVTCVVVDVSHEDGEVQFNWYVDGVEVHNAKTKPREEQFNS |
| | | TFRVVSVLTVVHQDWLNGKEYKCKVSNKGLPRPIEKTISKTKGQ |
| | | PREPQVYTLPPSREEMTKNQVSLTCLVKGFYPSDIAVEWESNGQ |
| | | PENNYKTTPPMLDSDGSFFLYSKLTVDKSRWQQGNVFSCSVMH |
| | | EALHNHYTQKSLSLSPGK |
| 156 | IgG2.3-V17 | ASTKGPSVFPLAPCSRSTSESTAALGCLVKDYFPEPVTVSWNSGA |
| | | LTSGVHTFPAVLQSSGLYSLSSVVTVPSSNFGTQTYTCNVDHKPS |
| | | NTKVDKTVERKSCVECPPCPAPPVAGDSVFLFPPKPKDTLMISRT |
| | | PEVTCVVVDVSDEDGEVQFNWYVDGVEVHNAKTKPREEQFNS |
| | | TFRVVSVLTVVHQDWLNGKEYKCKVSNKGLPRPIEKTISKTKGQ |
| | | PREPQVYTLPPSREEMTKNQVSLTCLVKGFYPSDIAVEWESNGQ |
| | | PENNYKTTPPMLDSDGSFFLYSKLTVDKSRWQQGNVFSCSVMH |
| | | EALHNHYTQKSLSLSPGK |
| 157 | IgG2.3-V18 | ASTKGPSVFPLAPCSRSTSESTAALGCLVKDYFPEPVTVSWNSGA |
| | | LTSGVHTFPAVLQSSGLYSLSSVVTVPSSNFGTQTYTCNVDHKPS |
| | | NTKVDKTVERKSCVECPPCPAPPVAGPSVFLFPPKPKDTLMISRT |
| | | PEVTCVVVDVEHEDPEVQFNWYVDGVEVHNAKTKPREEQFNST |
| | | FRVVSVLTVVHQDWLNGKEYKCKVSNKGLPAPIEKTISKTKGQP |
| | | REPQVYTLPPSREEMTKNQVSLTCLVKGFYPSDIAVEWESNGQP |
| | | ENNYKTTPPMLDSDGSFFLYSKLTVDKSRWQQGNVFSCSVMHE |
| | | ALHNHYTQKSLSLSPGK |
| 158 | IgG2.3-V19 | ASTKGPSVFPLAPCSRSTSESTAALGCLVKDYFPEPVTVSWNSGA |
| | | LTSGVHTFPAVLQSSGLYSLSSVVTVPSSNFGTQTYTCNVDHKPS |
| | | NTKVDKTVERKSCVECPPCPAPPVAGPSVFLFPPKPKDTLMISRT |
| | | PEVTCVVVDVEHEDPEVQFNWYVDGVEVHNAKTKPREEQFNST |
| | | FRVVSVLTVVHQDWLNGKEYKCKVSNKGFPAPIEKTISKTKGQP |
| | | REPQVYTLPPSREEMTKNQVSLTCLVKGFYPSDIAVEWESNGQP |
| | | ENNYKTTPPMLDSDGSFFLYSKLTVDKSRWQQGNVFSCSVMHE |
| | | ALHNHYTQKSLSLSPGK |
| 159 | IgG2.3G1 | ASTKGPSVFPLAPCSRSTSESTAALGCLVKDYFPEPVTVSWNSGA |
| | | LTSGVHTFPAVLQSSGLYSLSSVVTVPSSNFGTQTYTCNVDHKPS |
| | | NTKVDKTVERKSCVECPPCPAPELLGGPSVFLFPPKPKDTLMISR |
| | | TPEVTCVVVDVSHEDPEVKFNWYVDGVEVHNAKTKPREEQYN |
| | | STYRVVSVLTVLHQDWLNGKEYKCKVSNKALPAPIEKTISKAKG |
| | | QPREPQVYTLPPSREEMTKNQVSLTCLVKGFYPSDIAVEWESNG |
| | | QPENNYKTTPPVLDSDGSFFLYSKLTVDKSRWQQGNVFSCSVM |
| | | HEALHNHYTQKSLSLSPGK |
| 160 | IgG2.3G1-V20 | ASTKGPSVFPLAPCSRSTSESTAALGCLVKDYFPEPVTVSWNSGA |
| | | LTSGVHTFPAVLQSSGLYSLSSVVTVPSSNFGTQTYTCNVDHKPS |
| | | NTKVDKTVERKSCVECPPCPAPELLGGDSVFLFPPKPKDTLMISR |
| | | TPEVTCVVVDVSHEDPEVKFNWYVDGVEVHNAKTKPREEQYN |
| | | STYRVVSVLTVLHQDWLNGKEYKCKVSNKALPAPIEKTISKAKG |
| | | QPREPQVYTLPPSREEMTKNQVSLTCLVKGFYPSDIAVEWESNG |
| | | QPENNYKTTPPVLDSDGSFFLYSKLTVDKSRWQQGNVFSCSVM |
| | | HEALHNHYTQKSLSLSPGK |
| 161 | IgG2.3G1-V21 | ASTKGPSVFPLAPCSRSTSESTAALGCLVKDYFPEPVTVSWNSGA |
| | | LTSGVHTFPAVLQSSGLYSLSSVVTVPSSNFGTQTYTCNVDHKPS |
| | | NTKVDKTVERKSCVECPPCPAPELLGGDSVFLFPPKPKDTLMISR |
| | | TPEVTCVVVDVSHEDGEVKFNWYVDGVEVHNAKTKPREEQYN |
| | | STYRVVSVLTVLHQDWLNGKEYKCKVSNKALPAPIEKTISKAKG |
| | | QPREPQVYTLPPSREEMTKNQVSLTCLVKGFYPSDIAVEWESNG |
| | | QPENNYKTTPPVLDSDGSFFLYSKLTVDKSRWQQGNVFSCSVM |
| | | HEALHNHYTQKSLSLSPGK |
| 162 | IgG2.3G1-V22 | ASTKGPSVFPLAPCSRSTSESTAALGCLVKDYFPEPVTVSWNSGA |
| | | LTSGVHTFPAVLQSSGLYSLSSVVTVPSSNFGTQTYTCNVDHKPS |
| | | NTKVDKTVERKSCVECPPCPAPELLGGDSVFLFPPKPKDTLMISR |
| | | TPEVTCVVVDVSDEDGEVKFNWYVDGVEVHNAKTKPREEQYN |
| | | STYRVVSVLTVLHQDWLNGKEYKCKVSNKALPAPIEKTISKAKG |
| | | QPREPQVYTLPPSREEMTKNQVSLTCLVKGFYPSDIAVEWESNG |
| | | QPENNYKTTPPVLDSDGSFFLYSKLTVDKSRWQQGNVFSCSVM |
| | | HEALHNHYTQKSLSLSPGK |
| 163 | IgG2.3G1-V23 | ASTKGPSVFPLAPCSRSTSESTAALGCLVKDYFPEPVTVSWNSGA |
| | | LTSGVHTFPAVLQSSGLYSLSSVVTVPSSNFGTQTYTCNVDHKPS |
| | | NTKVDKTVERKSCVECPPCPAPELLGGDSVFLFPPKPKDTLMISR |
| | | TPEVTCVVVDVSHEDGEVKFNWYVDGVEVHNAKTKPREEQYN |
| | | STYRVVSVLTVLHQDWLNGKEYKCKVSNKALPRPIEKTISKAKG |
| | | QPREPQVYTLPPSREEMTKNQVSLTCLVKGFYPSDIAVEWESNG |
| | | QPENNYKTTPPVLDSDGSFFLYSKLTVDKSRWQQGNVFSCSVM |
| | | HEALHNHYTQKSLSLSPGK |
| 164 | IgG2.3G1-V24 | ASTKGPSVFPLAPCSRSTSESTAALGCLVKDYFPEPVTVSWNSGA |
| | | LTSGVHTFPAVLQSSGLYSLSSVVTVPSSNFGTQTYTCNVDHKPS |
| | | NTKVDKTVERKSCVECPPCPAPELLGGDSVFLFPPKPKDTLMISR |
| | | TPEVTCVVVDVSDEDGEVKFNWYVDGVEVHNAKTKPREEQYN |
| | | STYRVVSVLTVLHQDWLNGKEYKCKVSNKALPRPIEKTISKAKG |
| | | QPREPQVYTLPPSREEMTKNQVSLTCLVKGFYPSDIAVEWESNG |
| | | QPENNYKTTPPVLDSDGSFFLYSKLTVDKSRWQQGNVFSCSVM |
| | | HEALHNHYTQKSLSLSPGK |
| 165 | IgG2.3G1-V25 | ASTKGPSVFPLAPCSRSTSESTAALGCLVKDYFPEPVTVSWNSGA |
| | | LTSGVHTFPAVLQSSGLYSLSSVVTVPSSNFGTQTYTCNVDHKPS |
| | | NTKVDKTVERKSCVECPPCPAPELLGDDSVFLFPPKPKDTLMISR |
| | | TPEVTCVVVDVSDEDGEVKFNWYVDGVEVHNAKTKPREEQYN |
| | | STYRVVSVLTVLHQDWLNGKEYKCKVSNKALPRPIEKTISKAKG |
| | | QPREPQVYTLPPSREEMTKNQVSLTCLVKGFYPSDIAVEWESNG |
| | | QPENNYKTTPPVLDSDGSFFLYSKLTVDKSRWQQGNVFSCSVM |
| | | HEALHNHYTQKSLSLSPGK |
| 166 | IgG2.3G1-V26 | ASTKGPSVFPLAPCSRSTSESTAALGCLVKDYFPEPVTVSWNSGA |
| | | LTSGVHTFPAVLQSSGLYSLSSVVTVPSSNFGTQTYTCNVDHKPS |
| | | NTKVDKTVERKSCVECPPCPAPDLLGDDSVFLFPPKPKDTLMISR |
| | | TPEVTCVVVDVSDEDGEVKFNWYVDGVEVHNAKTKPREEQYN |
| | | STYRVVSVLTVLHQDWLNGKEYKCKVSNKALPRPIEKTISKAKG |
| | | QPREPQVYTLPPSREEMTKNQVSLTCLVKGFYPSDIAVEWESNG |
| | | QPENNYKTTPPVLDSDGSFFLYSKLTVDKSRWQQGNVFSCSVM |
| | | HEALHNHYTQKSLSLSPGK |
| 167 | IgG2.3G1-V27 | ASTKGPSVFPLAPCSRSTSESTAALGCLVKDYFPEPVTVSWNSGA |
| | | LTSGVHTFPAVLQSSGLYSLSSVVTVPSSNFGTQTYTCNVDHKPS |
| | | NTKVDKTVERKSCVECPPCPAPELLGGPSVFLFPPKPKDTLMISR |
| | | TPEVTCVVVDVEHEDPEVKFNWYVDGVEVHNAKTKPREEQYN |
| | | STYRVVSVLTVLHQDWLNGKEYKCKVSNKALPAPIEKTISKAKG |
| | | QPREPQVYTLPPSREEMTKNQVSLTCLVKGFYPSDIAVEWESNG |
| | | QPENNYKTTPPVLDSDGSFFLYSKLTVDKSRWQQGNVFSCSVM |
| | | HEALHNHYTQKSLSLSPGK |
| 168 | IgG2.3G1-V28 | ASTKGPSVFPLAPCSRSTSESTAALGCLVKDYFPEPVTVSWNSGA |
| | | LTSGVHTFPAVLQSSGLYSLSSVVTVPSSNFGTQTYTCNVDHKPS |
| | | NTKVDKTVERKSCVECPPCPAPELLGGPSVFLFPPKPKDTLMISR |
| | | TPEVTCVVVDVEHEDPEVKFNWYVDGVEVHNAKTKPREEQYN |
| | | STYRVVSVLTVLHQDWLNGKEYKCKVSNKAFPAPIEKTISKAKG |
| | | QPREPQVYTLPPSREEMTKNQVSLTCLVKGFYPSDIAVEWESNG |
| | | QPENNYKTTPPVLDSDGSFFLYSKLTVDKSRWQQGNVFSCSVM |
| | | HEALHNHYTQKSLSLSPGK |
| 169 | IgG2.3G1-AY-V9-D270E | ASTKGPSVFPLAPCSRSTSESTAALGCLVKDYFPEPVTVSWNSGA |
| | | LTSGVHTFPAVLQSSGLYSLSSVVTVPSSNFGTQTYTCNVDHKPS |
| | | NTKVDKTVERKSCVECPPCPAPELLGDDSVFLFPPKPKDTLMISR |
| | | TPEVTCVVVDVSHEEGEVKFNWYVDGVEVHNAKTKPREEQYN |
| | | STYRVVSVLTVLHQDWLNGKEYKCKVSNKALPRPIEKTISKAKG |
| | | QPREPQVYTLPPSREEMTKNQVSLTCLVKGFYPSDIAVEWESNG |
| | | QPENNYKTTPPVLDSDGSFFLYSKLTVDKSRWQQGNVFSCSVM |
| | | HEALHNHYTQKSLSLSPGK |
| 170 | IgG2.3G1-AY-V11 | ASTKGPSVFPLAPCSRSTSESTAALGCLVKDYFPEPVTVSWNSGA |
| | | LTSGVHTFPAVLQSSGLYSLSSVVTVPSSNFGTQTYTCNVDHKPS |
| | | NTKVDKTVERKSCVECPPCPAPELLGDDSVFLFPPKPKDTLMISR |
| | | TPEVTCVVVDVSDEDGEVKFNWYVDGVEVHNAKTKPREEQYN |
| | | STYRVVSVLTVLHQDWLNGKEYKCKVSNKALPRPIEKTISKAKG |
| | | QPREPQVYTLPPSREEMTKNQVSLTCLVKGFYPSDIAVEWESNG |
| | | QPENNYKTTPPVLDSDGSFFLYSKLTVDKSRWQQGNVFSCSVM |
| | | HEALHNHYTQKSLSLSPGK |
| 171 | IgG2.5G1-AY-V9-D270E | ASTKGPSVFPLAPSSRSTSESTAALGCLVKDYFPEPVTVSWNSGA |
| | | LTSGVHTFPAVLQSSGLYSLSSVVTVPSSNFGTQTYTCNVDHKPS |
| | | NTKVDKTVERKCCVECPPCPAPELLGDDSVFLFPPKPKDTLMISR |
| | | TPEVTCVVVDVSHEEGEVKFNWYVDGVEVHNAKTKPREEQYN |
| | | STYRVVSVLTVLHQDWLNGKEYKCKVSNKALPRPIEKTISKAKG |
| | | QPREPQVYTLPPSREEMTKNQVSLTCLVKGFYPSDIAVEWESNG |
| | | QPENNYKTTPPVLDSDGSFFLYSKLTVDKSRWQQGNVFSCSVM |
| | | HEALHNHYTQKSLSLSPGK |
| 172 | IgG2.5G1-AY-V11 | ASTKGPSVFPLAPSSRSTSESTAALGCLVKDYFPEPVTVSWNSGA |
| | | LTSGVHTFPAVLQSSGLYSLSSVVTVPSSNFGTQTYTCNVDHKPS |
| | | NTKVDKTVERKCCVECPPCPAPELLGDDSVFLFPPKPKDTLMISR |
| | | TPEVTCVVVDVSDEDGEVKFNWYVDGVEVHNAKTKPREEQYN |
| | | STYRVVSVLTVLHQDWLNGKEYKCKVSNKALPRPIEKTISKAKG |
| | | QPREPQVYTLPPSREEMTKNQVSLTCLVKGFYPSDIAVEWESNG |
| | | QPENNYKTTPPVLDSDGSFFLYSKLTVDKSRWQQGNVFSCSVM |
| | | HEALHNHYTQKSLSLSPGK |
| 173 | IgG1f-GASDALIE | ASTKGPSVFPLAPSSKSTSGGTAALGCLVKDYFPEPVTVSWNSG |
| | | ALTSGVHTFPAVLQSSGLYSLSSVVTVPSSSLGTQTYICNVNHKP |
| | | SNTKVDKRVEPKSCDKTHTCPPCPAPELLAGPDVFLFPPKPKDTL |
| | | MISRTPEVTCVVVDVSHEDPEVKFNWYVDGVEVHNAKTKPREE |
| | | QYNSTYRVVSVLTVLHQDWLNGKEYKCKVSNKALPLPEEKTIS |
| | | KAKGQPREPQVYTLPPSREEMTKNQVSLTCLVKGFYPSDIAVEW |
| | | ESNGQPENNYKTTPPVLDSDGSFFLYSKLTVDKSRWQQGNVFSC |
| | | SVMHEALHNHYTQKSLSLSPGK |
| 174 | IgG1f-G236A | ASTKGPSVFPLAPSSKSTSGGTAALGCLVKDYFPEPVTVSWNSG |
| | | ALTSGVHTFPAVLQSSGLYSLSSVVTVPSSSLGTQTYICNVNHKP |
| | | SNTKVDKRVEPKSCDKTHTCPPCPAPELLAGPSVFLFPPKPKDTL |
| | | MISRTPEVTCVVVDVSHEDPEVKFNWYVDGVEVHNAKTKPREE |
| | | QYNSTYRVVSVLTVLHQDWLNGKEYKCKVSNKALPAPIEKTISK |
| | | AKGQPREPQVYTLPPSREEMTKNQVSLTCLVKGFYPSDIAVEWE |
| | | SNGQPENNYKTTPPVLDSDGSFFLYSKLTVDKSRWQQGNVFSCS |
| | | VMHEALHNHYTQKSLSLSPGK |
| 175 | IgG2.3G1-AY-G236A | ASTKGPSVFPLAPCSRSTSESTAALGCLVKDYFPEPVTVSWNSGA |
| | | LTSGVHTFPAVLQSSGLYSLSSVVTVPSSNFGTQTYTCNVDHKPS |
| | | NTKVDKTVERKSCVECPPCPAPELLAGPSVFLFPPKPKDTLMISR |
| | | TPEVTCVVVDVSHEDPEVKFNWYVDGVEVHNAKTKPREEQYN |
| | | STYRVVSVLTVLHQDWLNGKEYKCKVSNKALPAPIEKTISKAKG |
| | | QPREPQVYTLPPSREEMTKNQVSLTCLVKGFYPSDIAVEWESNG |
| | | QPENNYKTTPPVLDSDGSFFLYSKLTVDKSRWQQGNVFSCSVM |
| | | HEALHNHYTQKSLSLSPGK |
| 176 | IgG2.3G1-AY-GASDALIE | ASTKGPSVFPLAPCSRSTSESTAALGCLVKDYFPEPVTVSWNSGA |
| | | LTSGVHTFPAVLQSSGLYSLSSVVTVPSSNFGTQTYTCNVDHKPS |
| | | NTKVDKTVERKSCVECPPCPAPELLAGPDVFLFPPKPKDTLMISR |
| | | TPEVTCVVVDVSHEDPEVKFNWYVDGVEVHNAKTKPREEQYN |
| | | STYRVVSVLTVLHQDWLNGKEYKCKVSNKALPLPEEKTISKAK |
| | | GQPREPQVYTLPPSREEMTKNQVSLTCLVKGFYPSDIAVEWESN |
| | | GQPENNYKTTPPVLDSDGSFFLYSKLTVDKSRWQQGNVFSCSV |
| | | MHEALHNHYTQKSLSLSPGK |
| 177 | IgG2.5G1-AY-G236A | ASTKGPSVFPLAPSSRSTSESTAALGCLVKDYFPEPVTVSWNSGA |
| | | LTSGVHTFPAVLQSSGLYSLSSVVTVPSSNFGTQTYTCNVDHKPS |
| | | NTKVDKTVERKCCVECPPCPAPELLAGPSVFLFPPKPKDTLMISR |
| | | TPEVTCVVVDVSHEDPEVKFNWYVDGVEVHNAKTKPREEQYN |
| | | STYRVVSVLTVLHQDWLNGKEYKCKVSNKALPAPIEKTISKAKG |
| | | QPREPQVYTLPPSREEMTKNQVSLTCLVKGFYPSDIAVEWESNG |
| | | QPENNYKTTPPVLDSDGSFFLYSKLTVDKSRWQQGNVFSCSVM |
| | | HEALHNHYTQKSLSLSPGK |
| 178 | IgG2.5G1-AY-GASDALIE | STKGPSVFPLAPSSRSTSESTAALGCLVKDYFPEPVTVSWNSGAL |
| | | TSGVHTFPAVLQSSGLYSLSSVVTVPSSNFGTQTYTCNVDHKPSN |
| | | TKVDKTVERKCCVECPPCPAPELLAGPDVFLFPPKPKDTLMISRT |
| | | PEVTCVVVDVSHEDPEVKFNWYVDGVEVHNAKTKPREEQYNS |
| | | TYRVVSVLTVLHQDWLNGKEYKCKVSNKALPLPEEKTISKAKG |
| | | QPREPQVYTLPPSREEMTKNQVSLTCLVKGFYPSDIAVEWESNG |
| | | QPENNYKTTPPVLDSDGSFFLYSKLTVDKSRWQQGNVFSCSVM |
| | | HEALHNHYTQKSLSLSPGK |
| 179 | IgG2.3G1.1f-AY | ASTKGPSVFPLAPCSRSTSESTAALGCLVKDYFPEPVTVSWNSGA |
| | | LTSGVHTFPAVLQSSGLYSLSSVVTVPSSNFGTQTYTCNVDHKPS |
| | | NTKVDKTVERKSCVECPPCPAPEAEGAPSVFLFPPKPKDTLMISR |
| | | TPEVTCVVVDVSHEDPEVKFNWYVDGVEVHNAKTKPREEQYN |
| | | STYRVVSVLTVLHQDWLNGKEYKCKVSNKALPSSIEKTISKAKG |
| | | QPREPQVYTLPPSREEMTKNQVSLTCLVKGFYPSDIAVEWESNG |
| | | QPENNYKTTPPVLDSDGSFFLYSKLTVDKSRWQQGNVFSCSVM |
| | | HEALHNHYTQKSLSLSPGK |
| 180 | IgG2.3G1.3f-AY | ASTKGPSVFPLAPCSRSTSESTAALGCLVKDYFPEPVTVSWNSGA |
| | | LTSGVHTFPAVLQSSGLYSLSSVVTVPSSNFGTQTYTCNVDHKPS |
| | | NTKVDKTVERKSCVECPPCPAPEAEGAPSVFLFPPKPKDTLMISR |
| | | TPEVTCVVVDVSHEDPEVKFNWYVDGVEVHNAKTKPREEQYN |
| | | STYRVVSVLTVLHQDWLNGKEYKCKVSNKALPAPIEKTISKAKG |
| | | QPREPQVYTLPPSREEMTKNQVSLTCLVKGFYPSDIAVEWESNG |
| | | QPENNYKTTPPVLDSDGSFFLYSKLTVDKSRWQQGNVFSCSVM |
| | | HEALHNHYTQKSLSLSPGK |
| 181 | IgG2.3G1-AY-D265A | ASTKGPSVFPLAPCSRSTSESTAALGCLVKDYFPEPVTVSWNSGA |
| | | LTSGVHTFPAVLQSSGLYSLSSVVTVPSSNFGTQTYTCNVDHKPS |
| | | NTKVDKTVERKSCVECPPCPAPELLGGPSVFLFPPKPKDTLMISR |
| | | TPEVTCVVVAVSHEDPEVKFNWYVDGVEVHNAKTKPREEQYN |
| | | STYRVVSVLTVLHQDWLNGKEYKCKVSNKALPAPIEKTISKAKG |
| | | QPREPQVYTLPPSREEMTKNQVSLTCLVKGFYPSDIAVEWESNG |
| | | QPENNYKTTPPVLDSDGSFFLYSKLTVDKSRWQQGNVFSCSVM |
| | | HEALHNHYTQKSLSLSPGK |
| 182 | IgG2.3G1-AY-N297A | ASTKGPSVFPLAPCSRSTSESTAALGCLVKDYFPEPVTVSWNSGA |
| | | LTSGVHTFPAVLQSSGLYSLSSVVTVPSSNFGTQTYTCNVDHKPS |
| | | NTKVDKTVERKSCVECPPCPAPELLGGPSVFLFPPKPKDTLMISR |
| | | TPEVTCVVVDVSHEDPEVKFNWYVDGVEVHNAKTKPREEQYA |
| | | STYRVVSVLTVLHQDWLNGKEYKCKVSNKALPAPIEKTISKAKG |
| | | QPREPQVYTLPPSREEMTKNQVSLTCLVKGFYPSDIAVEWESNG |
| | | QPENNYKTTPPVLDSDGSFFLYSKLTVDKSRWQQGNVFSCSVM |
| | | HEALHNHYTQKSLSLSPGK |
| 183 | IgG2.5G1.1f-AY | ASTKGPSVFPLAPSSRSTSESTAALGCLVKDYFPEPVTVSWNSGA |
| | | LTSGVHTFPAVLQSSGLYSLSSVVTVPSSNFGTQTYTCNVDHKPS |
| | | NTKVDKTVERKCCVECPPCPAPEAEGAPSVFLFPPKPKDTLMISR |
| | | TPEVTCVVVDVSHEDPEVKFNWYVDGVEVHNAKTKPREEQYN |
| | | STYRVVSVLTVLHQDWLNGKEYKCKVSNKALPSSIEKTISKAKG |
| | | QPREPQVYTLPPSREEMTKNQVSLTCLVKGFYPSDIAVEWESNG |
| | | QPENNYKTTPPVLDSDGSFFLYSKLTVDKSRWQQGNVFSCSVM |
| | | HEALHNHYTQKSLSLSPGK |
| 184 | IgG2.5G1.3f-AY | ASTKGPSVFPLAPSSRSTSESTAALGCLVKDYFPEPVTVSWNSGA |
| | | LTSGVHTFPAVLQSSGLYSLSSVVTVPSSNFGTQTYTCNVDHKPS |
| | | NTKVDKTVERKCCVECPPCPAPEAEGAPSVFLFPPKPKDTLMISR |
| | | TPEVTCVVVDVSHEDPEVKFNWYVDGVEVHNAKTKPREEQYN |
| | | STYRVVSVLTVLHQDWLNGKEYKCKVSNKALPAPIEKTISKAKG |
| | | QPREPQVYTLPPSREEMTKNQVSLTCLVKGFYPSDIAVEWESNG |
| | | QPENNYKTTPPVLDSDGSFFLYSKLTVDKSRWQQGNVFSCSVM |
| | | HEALHNHYTQKSLSLSPGK |
| 185 | IgG2.5G1-AY-D265A | ASTKGPSVFPLAPSSRSTSESTAALGCLVKDYFPEPVTVSWNSGA |
| | | LTSGVHTFPAVLQSSGLYSLSSVVTVPSSNFGTQTYTCNVDHKPS |
| | | NTKVDKTVERKCCVECPPCPAPELLGGPSVFLFPPKPKDTLMISR |
| | | TPEVTCVVVAVSHEDPEVKFNWYVDGVEVHNAKTKPREEQYN |
| | | STYRVVSVLTVLHQDWLNGKEYKCKVSNKALPAPIEKTISKAKG |
| | | QPREPQVYTLPPSREEMTKNQVSLTCLVKGFYPSDIAVEWESNG |
| | | QPENNYKTTPPVLDSDGSFFLYSKLTVDKSRWQQGNVFSCSVM |
| | | HEALHNHYTQKSLSLSPGK |
| 186 | IgG2.5G1-AY-N297A | ASTKGPSVFPLAPSSRSTSESTAALGCLVKDYFPEPVTVSWNSGA |
| | | LTSGVHTFPAVLQSSGLYSLSSVVTVPSSNFGTQTYTCNVDHKPS |
| | | NTKVDKTVERKCCVECPPCPAPELLGGPSVFLFPPKPKDTLMISR |
| | | TPEVTCVVVDVSHEDPEVKFNWYVDGVEVHNAKTKPREEQYA |
| | | STYRVVSVLTVLHQDWLNGKEYKCKVSNKALPAPIEKTISKAKG |
| | | QPREPQVYTLPPSREEMTKNQVSLTCLVKGFYPSDIAVEWESNG |
| | | QPENNYKTTPPVLDSDGSFFLYSKLTVDKSRWQQGNVFSCSVM |
| | | HEALHNHYTQKSLSLSPGK |
| 187 | CT | ASTKGPSVFPLAPSSKSTSGGTAALGCLVKDYFPEPVTVSWNSG |
| | | ALTSGVHTFPAVLQSSGLYSLSSVVTVPSSSLGTQTYICNVNHKP |
| | | SNTKVDKRVEPKSCDKTHTSPPSPAPELLGGSSVFLFPPKPKDTL |
| | | MISRTPEVTCVVVDVSHEDPEVKFNWYVDGVEVHNAKTKPREE |
| | | QYNSTYRVVSVLTVLHQDWLNGKEYKCKVSNKALPAPIEKTISK |
| | | AKGQPREPQVYTLPPSRDELTKNQVSLTCLVKGFYPSDIAVEWE |
| | | SNGQPENNYKTTPPVLDSDGSFFLYSKLTVDKSRWQQGNVFSCS |
| | | VMHEALHNHYTQKSLSLSPGK |
| 188 | CTf | ASTKGPSVFPLAPSSKSTSGGTAALGCLVKDYFPEPVTVSWNSG |
| | | ALTSGVHTFPAVLQSSGLYSLSSVVTVPSSSLGTQTYICNVNHKP |
| | | SNTKVDKRVEPKSCDKTHTSPPSPAPELLGGSSVFLFPPKPKDTL |
| | | MISRTPEVTCVVVDVSHEDPEVKFNWYVDGVEVHNAKTKPREE |
| | | QYNSTYRVVSVLTVLHQDWLNGKEYKCKVSNKALPAPIEKTISK |
| | | AKGQPREPQVYTLPPSREEMTKNQVSLTCLVKGFYPSDIAVEWE |
| | | SNGQPENNYKTTPPVLDSDGSFFLYSKLTVDKSRWQQGNVFSCS |
| | | VMHEALHNHYTQKSLSLSPGK |
| 189 | IgG2.3-CT | ASTKGPSVFPLAPCSRSTSESTAALGCLVKDYFPEPVTVSWNSGA |
| | | LTSGVHTFPAVLQSSGLYSLSSVVTVPSSNFGTQTYTCNVDHKPS |
| | | NTKVDKTVERKSCVESPPSPAPELLGGSSVFLFPPKPKDTLMISRT |
| | | PEVTCVVVDVSHEDPEVKFNWYVDGVEVHNAKTKPREEQYNS |
| | | TYRVVSVLTVLHQDWLNGKEYKCKVSNKALPAPIEKTISKAKG |
| | | QPREPQVYTLPPSRDELTKNQVSLTCLVKGFYPSDIAVEWESNG |
| | | QPENNYKTTPPVLDSDGSFFLYSKLTVDKSRWQQGNVFSCSVM |
| | | HEALHNHYTQKSLSLSPGK |
| 190 | IgG2.5-CT | ASTKGPSVFPLAPSSRSTSESTAALGCLVKDYFPEPVTVSWNSGA |
| | | LTSGVHTFPAVLQSSGLYSLSSVVTVPSSNFGTQTYTCNVDHKPS |
| | | NTKVDKTVERKCCVESPPSPAPELLGGSSVFLFPPKPKDTLMISR |
| | | TPEVTCVVVDVSHEDPEVKFNWYVDGVEVHNAKTKPREEQYN |
| | | STYRVVSVLTVLHQDWLNGKEYKCKVSNKALPAPIEKTISKAKG |
| | | QPREPQVYTLPPSRDELTKNQVSLTCLVKGFYPSDIAVEWESNG |
| | | QPENNYKTTPPVLDSDGSFFLYSKLTVDKSRWQQGNVFSCSVM |
| | | HEALHNHYTQKSLSLSPGK |
| 191 | IgG1fa-C226S | ASTKGPSVFPLAPSSKSTSGGTAALGCLVKDYFPEPVTVSWNSG |
| | | ALTSGVHTFPAVLQSSGLYSLSSVVTVPSSSLGTQTYICNVNHKP |
| | | SNTKVDKRVEPKSCDKTHTSPPCPAPELLGGPSVFLFPPKPKDTL |
| | | MISRTPEVTCVVVDVSHEDPEVKFNWYVDGVEVHNAKTKPREE |
| | | QYNSTYRVVSVLTVLHQDWLNGKEYKCKVSNKALPAPIEKTISK |
| | | AKGQPREPQVYTLPPSRDELTKNQVSLTCLVKGFYPSDIAVEWE |
| | | SNGQPENNYKTTPPVLDSDGSFFLYSKLTVDKSRWQQGNVFSCS |
| | | VMHEALHNHYTQKSLSLSPGK |
| 192 | IgG1fa-C229S | ASTKGPSVFPLAPSSKSTSGGTAALGCLVKDYFPEPVTVSWNSG |
| | | ALTSGVHTFPAVLQSSGLYSLSSVVTVPSSSLGTQTYICNVNHKP |
| | | SNTKVDKRVEPKSCDKTHTCPPSPAPELLGGPSVFLFPPKPKDTL |
| | | MISRTPEVTCVVVDVSHEDPEVKFNWYVDGVEVHNAKTKPREE |
| | | QYNSTYRVVSVLTVLHQDWLNGKEYKCKVSNKALPAPIEKTISK |
| | | AKGQPREPQVYTLPPSRDELTKNQVSLTCLVKGFYPSDIAVEWE |
| | | SNGQPENNYKTTPPVLDSDGSFFLYSKLTVDKSRWQQGNVFSCS |
| | | VMHEALHNHYTQKSLSLSPGK |
| 193 | IgG1fa-C226S, C229S | ASTKGPSVFPLAPSSKSTSGGTAALGCLVKDYFPEPVTVSWNSG |
| | | ALTSGVHTFPAVLQSSGLYSLSSVVTVPSSSLGTQTYICNVNHKP |
| | | SNTKVDKRVEPKSCDKTHTSPPSPAPELLGGPSVFLFPPKPKDTL |
| | | MISRTPEVTCVVVDVSHEDPEVKFNWYVDGVEVHNAKTKPREE |
| | | QYNSTYRVVSVLTVLHQDWLNGKEYKCKVSNKALPAPIEKTISK |
| | | AKGQPREPQVYTLPPSRDELTKNQVSLTCLVKGFYPSDIAVEWE |
| | | SNGQPENNYKTTPPVLDSDGSFFLYSKLTVDKSRWQQGNVFSCS |
| | | VMHEALHNHYTQKSLSLSPGK |
| 194 | IgG1fa-P238S | ASTKGPSVFPLAPSSKSTSGGTAALGCLVKDYFPEPVTVSWNSG |
| | | ALTSGVHTFPAVLQSSGLYSLSSVVTVPSSSLGTQTYICNVNHKP |
| | | SNTKVDKRVEPKSCDKTHTCPPCPAPELLGGSSVFLFPPKPKDTL |
| | | MISRTPEVTCVVVDVSHEDPEVKFNWYVDGVEVHNAKTKPREE |
| | | QYNSTYRVVSVLTVLHQDWLNGKEYKCKVSNKALPAPIEKTISK |
| | | AKGQPREPQVYTLPPSRDELTKNQVSLTCLVKGFYPSDIAVEWE |
| | | SNGQPENNYKTTPPVLDSDGSFFLYSKLTVDKSRWQQGNVFSCS |
| | | VMHEALHNHYTQKSLSLSPGK |
| 195 | IgG1fa-C226A | ASTKGPSVFPLAPSSKSTSGGTAALGCLVKDYFPEPVTVSWNSG |
| | | ALTSGVHTFPAVLQSSGLYSLSSVVTVPSSSLGTQTYICNVNHKP |
| | | SNTKVDKRVEPKSCDKTHTAPPCPAPELLGGPSVFLFPPKPKDTL |
| | | MISRTPEVTCVVVDVSHEDPEVKFNWYVDGVEVHNAKTKPREE |
| | | QYNSTYRVVSVLTVLHQDWLNGKEYKCKVSNKALPAPIEKTISK |
| | | AKGQPREPQVYTLPPSRDELTKNQVSLTCLVKGFYPSDIAVEWE |
| | | SNGQPENNYKTTPPVLDSDGSFFLYSKLTVDKSRWQQGNVFSCS |
| | | VMHEALHNHYTQKSLSLSPGK |
| 196 | IgG1fa-C229A | ASTKGPSVFPLAPSSKSTSGGTAALGCLVKDYFPEPVTVSWNSG |
| | | ALTSGVHTFPAVLQSSGLYSLSSVVTVPSSSLGTQTYICNVNHKP |
| | | SNTKVDKRVEPKSCDKTHTCPPAPAPELLGGPSVFLFPPKPKDTL |
| | | MISRTPEVTCVVVDVSHEDPEVKFNWYVDGVEVHNAKTKPREE |
| | | QYNSTYRVVSVLTVLHQDWLNGKEYKCKVSNKALPAPIEKTISK |
| | | AKGQPREPQVYTLPPSRDELTKNQVSLTCLVKGFYPSDIAVEWE |
| | | SNGQPENNYKTTPPVLDSDGSFFLYSKLTVDKSRWQQGNVFSCS |
| | | VMHEALHNHYTQKSLSLSPGK |
| 197 | IgG1fa-C226A, C229A | ASTKGPSVFPLAPSSKSTSGGTAALGCLVKDYFPEPVTVSWNSG |
| | | ALTSGVHTFPAVLQSSGLYSLSSVVTVPSSSLGTQTYICNVNHKP |
| | | SNTKVDKRVEPKSCDKTHTAPPAPAPELLGGPSVFLFPPKPKDTL |
| | | MISRTPEVTCVVVDVSHEDPEVKFNWYVDGVEVHNAKTKPREE |
| | | QYNSTYRVVSVLTVLHQDWLNGKEYKCKVSNKALPAPIEKTISK |
| | | AKGQPREPQVYTLPPSRDELTKNQVSLTCLVKGFYPSDIAVEWE |
| | | SNGQPENNYKTTPPVLDSDGSFFLYSKLTVDKSRWQQGNVFSCS |
| | | VMHEALHNHYTQKSLSLSPGK |
| 198 | IgG1fa-P238K | ASTKGPSVFPLAPSSKSTSGGTAALGCLVKDYFPEPVTVSWNSG |
| | | ALTSGVHTFPAVLQSSGLYSLSSVVTVPSSSLGTQTYICNVNHKP |
| | | SNTKVDKRVEPKSCDKTHTCPPCPAPELLGGKSVFLFPPKPKDTL |
| | | MISRTPEVTCVVVDVSHEDPEVKFNWYVDGVEVHNAKTKPREE |
| | | QYNSTYRVVSVLTVLHQDWLNGKEYKCKVSNKALPAPIEKTISK |
| | | AKGQPREPQVYTLPPSRDELTKNQVSLTCLVKGFYPSDIAVEWE |
| | | SNGQPENNYKTTPPVLDSDGSFFLYSKLTVDKSRWQQGNVFSCS |
| | | VMHEALHNHYTQKSLSLSPGK |
| 199 | IgG2.3-R133K | ASTKGPSVFPLAPCSKSTSESTAALGCLVKDYFPEPVTVSWNSGA |
| | | LTSGVHTFPAVLQSSGLYSLSSVVTVPSSNFGTQTYTCNVDHKPS |
| | | NTKVDKTVERKSCVECPPCPAPPVAGPSVFLFPPKPKDTLMISRT |
| | | PEVTCVVVDVSHEDPEVQFNWYVDGVEVHNAKTKPREEQFNST |
| | | FRVVSVLTVVHQDWLNGKEYKCKVSNKGLPAPIEKTISKTKGQP |
| | | REPQVYTLPPSREEMTKNQVSLTCLVKGFYPSDIAVEWESNGQP |
| | | ENNYKTTPPMLDSDGSFFLYSKLTVDKSRWQQGNVFSCSVMHE |
| | | ALHNHYTQKSLSLSPGK |
| 200 | IgG2.3-E137G | ASTKGPSVFPLAPCSRSTSGSTAALGCLVKDYFPEPVTVSWNSG |
| | | ALTSGVHTFPAVLQSSGLYSLSSVVTVPSSNFGTQTYTCNVDHK |
| | | PSNTKVDKTVERKSCVECPPCPAPPVAGPSVFLFPPKPKDTLMIS |
| | | RTPEVTCVVVDVSHEDPEVQFNWYVDGVEVHNAKTKPREEQFN |
| | | STFRVVSVLTVVHQDWLNGKEYKCKVSNKGLPAPIEKTISKTKG |
| | | QPREPQVYTLPPSREEMTKNQVSLTCLVKGFYPSDIAVEWESNG |
| | | QPENNYKTTPPMLDSDGSFFLYSKLTVDKSRWQQGNVFSCSVM |
| | | HEALHNHYTQKSLSLSPGK |
| 201 | IgG2.3-S138G | ASTKGPSVFPLAPCSRSTSEGTAALGCLVKDYFPEPVTVSWNSG |
| | | ALTSGVHTFPAVLQSSGLYSLSSVVTVPSSNFGTQTYTCNVDHK |
| | | PSNTKVDKTVERKSCVECPPCPAPPVAGPSVFLFPPKPKDTLMIS |
| | | RTPEVTCVVVDVSHEDPEVQFNWYVDGVEVHNAKTKPREEQFN |
| | | STFRVVSVLTVVHQDWLNGKEYKCKVSNKGLPAPIEKTISKTKG |
| | | QPREPQVYTLPPSREEMTKNQVSLTCLVKGFYPSDIAVEWESNG |
| | | QPENNYKTTPPMLDSDGSFFLYSKLTVDKSRWQQGNVFSCSVM |
| | | HEALHNHYTQKSLSLSPGK |
| 202 | IgG2.3-E137G-S138G | ASTKGPSVFPLAPCSRSTSGGTAALGCLVKDYFPEPVTVSWNSG |
| | | ALTSGVHTFPAVLQSSGLYSLSSVVTVPSSNFGTQTYTCNVDHK |
| | | PSNTKVDKTVERKSCVECPPCPAPPVAGPSVFLFPPKPKDTLMIS |
| | | RTPEVTCVVVDVSHEDPEVQFNWYVDGVEVHNAKTKPREEQFN |
| | | STFRVVSVLTVVHQDWLNGKEYKCKVSNKGLPAPIEKTISKTKG |
| | | QPREPQVYTLPPSREEMTKNQVSLTCLVKGFYPSDIAVEWESNG |
| | | QPENNYKTTPPMLDSDGSFFLYSKLTVDKSRWQQGNVFSCSVM |
| | | HEALHNHYTQKSLSLSPGK |
| 203 | IgG2.3-T214R | ASTKGPSVFPLAPCSRSTSESTAALGCLVKDYFPEPVTVSWNSGA |
| | | LTSGVHTFPAVLQSSGLYSLSSVVTVPSSNFGTQTYTCNVDHKPS |
| | | NTKVDKRVERKSCVECPPCPAPPVAGPSVFLFPPKPKDTLMISRT |
| | | PEVTCVVVDVSHEDPEVQFNWYVDGVEVHNAKTKPREEQFNST |
| | | FRVVSVLTVVHQDWLNGKEYKCKVSNKGLPAPIEKTISKTKGQP |
| | | REPQVYTLPPSREEMTKNQVSLTCLVKGFYPSDIAVEWESNGQP |
| | | ENNYKTTPPMLDSDGSFFLYSKLTVDKSRWQQGNVFSCSVMHE |
| | | ALHNHYTQKSLSLSPGK |
| 204 | IgG2.3-R217P | ASTKGPSVFPLAPCSRSTSESTAALGCLVKDYFPEPVTVSWNSGA |
| | | LTSGVHTFPAVLQSSGLYSLSSVVTVPSSNFGTQTYTCNVDHKPS |
| | | NTKVDKTVEPKSCVECPPCPAPPVAGPSVFLFPPKPKDTLMISRT |
| | | PEVTCVVVDVSHEDPEVQFNWYVDGVEVHNAKTKPREEQFNST |
| | | FRVVSVLTVVHQDWLNGKEYKCKVSNKGLPAPIEKTISKTKGQP |
| | | REPQVYTLPPSREEMTKNQVSLTCLVKGFYPSDIAVEWESNGQP |
| | | ENNYKTTPPMLDSDGSFFLYSKLTVDKSRWQQGNVFSCSVMHE |
| | | ALHNHYTQKSLSLSPGK |
| 205 | IgG2.3-R217S | ASTKGPSVFPLAPCSRSTSESTAALGCLVKDYFPEPVTVSWNSGA |
| | | LTSGVHTFPAVLQSSGLYSLSSVVTVPSSNFGTQTYTCNVDHKPS |
| | | NTKVDKTVESKSCVECPPCPAPPVAGPSVFLFPPKPKDTLMISRT |
| | | PEVTCVVVDVSHEDPEVQFNWYVDGVEVHNAKTKPREEQFNST |
| | | FRVVSVLTVVHQDWLNGKEYKCKVSNKGLPAPIEKTISKTKGQP |
| | | REPQVYTLPPSREEMTKNQVSLTCLVKGFYPSDIAVEWESNGQP |
| | | ENNYKTTPPMLDSDGSFFLYSKLTVDKSRWQQGNVFSCSVMHE |
| | | ALHNHYTQKSLSLSPGK |
| 206 | IgG2.3-V224A | ASTKGPSVFPLAPCSRSTSESTAALGCLVKDYFPEPVTVSWNSGA |
| | | LTSGVHTFPAVLQSSGLYSLSSVVTVPSSNFGTQTYTCNVDHKPS |
| | | NTKVDKTVERKSCAECPPCPAPPVAGPSVFLFPPKPKDTLMISRT |
| | | PEVTCVVVDVSHEDPEVQFNWYVDGVEVHNAKTKPREEQFNST |
| | | FRVVSVLTVVHQDWLNGKEYKCKVSNKGLPAPIEKTISKTKGQP |
| | | REPQVYTLPPSREEMTKNQVSLTCLVKGFYPSDIAVEWESNGQP |
| | | ENNYKTTPPMLDSDGSFFLYSKLTVDKSRWQQGNVFSCSVMHE |
| | | ALHNHYTQKSLSLSPGK |
| 207 | IgG2.3-E225A | ASTKGPSVFPLAPCSRSTSESTAALGCLVKDYFPEPVTVSWNSGA |
| | | LTSGVHTFPAVLQSSGLYSLSSVVTVPSSNFGTQTYTCNVDHKPS |
| | | NTKVDKTVERKSCVACPPCPAPPVAGPSVFLFPPKPKDTLMISRT |
| | | PEVTCVVVDVSHEDPEVQFNWYVDGVEVHNAKTKPREEQFNST |
| | | FRVVSVLTVVHQDWLNGKEYKCKVSNKGLPAPIEKTISKTKGQP |
| | | REPQVYTLPPSREEMTKNQVSLTCLVKGFYPSDIAVEWESNGQP |
| | | ENNYKTTPPMLDSDGSFFLYSKLTVDKSRWQQGNVFSCSVMHE |
| | | ALHNHYTQKSLSLSPGK |
| 208 | IgG2.3-R133A | ASTKGPSVFPLAPCSASTSESTAALGCLVKDYFPEPVTVSWNSGA |
| | | LTSGVHTFPAVLQSSGLYSLSSVVTVPSSNFGTQTYTCNVDHKPS |
| | | NTKVDKTVERKSCVECPPCPAPPVAGPSVFLFPPKPKDTLMISRT |
| | | PEVTCVVVDVSHEDPEVQFNWYVDGVEVHNAKTKPREEQFNST |
| | | FRVVSVLTVVHQDWLNGKEYKCKVSNKGLPAPIEKTISKTKGQP |
| | | REPQVYTLPPSREEMTKNQVSLTCLVKGFYPSDIAVEWESNGQP |
| | | ENNYKTTPPMLDSDGSFFLYSKLTVDKSRWQQGNVFSCSVMHE |
| | | ALHNHYTQKSLSLSPGK |
| 209 | IgG2.3-E137D | ASTKGPSVFPLAPCSRSTSDSTAALGCLVKDYFPEPVTVSWNSG |
| | | ALTSGVHTFPAVLQSSGLYSLSSVVTVPSSNFGTQTYTCNVDHK |
| | | PSNTKVDKTVERKSCVECPPCPAPPVAGPSVFLFPPKPKDTLMIS |
| | | RTPEVTCVVVDVSHEDPEVQFNWYVDGVEVHNAKTKPREEQFN |
| | | STFRVVSVLTVVHQDWLNGKEYKCKVSNKGLPAPIEKTISKTKG |
| | | QPREPQVYTLPPSREEMTKNQVSLTCLVKGFYPSDIAVEWESNG |
| | | QPENNYKTTPPMLDSDGSFFLYSKLTVDKSRWQQGNVFSCSVM |
| | | HEALHNHYTQKSLSLSPGK |
| 210 | IgG2.3-E137Q | ASTKGPSVFPLAPCSRSTSQSTAALGCLVKDYFPEPVTVSWNSG |
| | | ALTSGVHTFPAVLQSSGLYSLSSVVTVPSSNFGTQTYTCNVDHK |
| | | PSNTKVDKTVERKSCVECPPCPAPPVAGPSVFLFPPKPKDTLMIS |
| | | RTPEVTCVVVDVSHEDPEVQFNWYVDGVEVHNAKTKPREEQFN |
| | | STFRVVSVLTVVHQDWLNGKEYKCKVSNKGLPAPIEKTISKTKG |
| | | QPREPQVYTLPPSREEMTKNQVSLTCLVKGFYPSDIAVEWESNG |
| | | QPENNYKTTPPMLDSDGSFFLYSKLTVDKSRWQQGNVFSCSVM |
| | | HEALHNHYTQKSLSLSPGK |
| 211 | IgG2.3-S138T | ASTKGPSVFPLAPCSRSTSETTAALGCLVKDYFPEPVTVSWNSGA |
| | | LTSGVHTFPAVLQSSGLYSLSSVVTVPSSNFGTQTYTCNVDHKPS |
| | | NTKVDKTVERKSCVECPPCPAPPVAGPSVFLFPPKPKDTLMISRT |
| | | PEVTCVVVDVSHEDPEVQFNWYVDGVEVHNAKTKPREEQFNST |
| | | FRVVSVLTVVHQDWLNGKEYKCKVSNKGLPAPIEKTISKTKGQP |
| | | REPQVYTLPPSREEMTKNQVSLTCLVKGFYPSDIAVEWESNGQP |
| | | ENNYKTTPPMLDSDGSFFLYSKLTVDKSRWQQGNVFSCSVMHE |
| | | ALHNHYTQKSLSLSPGK |
| 212 | IgG2.3-S138E | ASTKGPSVFPLAPCSRSTSEETAALGCLVKDYFPEPVTVSWNSGA |
| | | LTSGVHTFPAVLQSSGLYSLSSVVTVPSSNFGTQTYTCNVDHKPS |
| | | NTKVDKTVERKSCVECPPCPAPPVAGPSVFLFPPKPKDTLMISRT |
| | | PEVTCVVVDVSHEDPEVQFNWYVDGVEVHNAKTKPREEQFNST |
| | | FRVVSVLTVVHQDWLNGKEYKCKVSNKGLPAPIEKTISKTKGQP |
| | | REPQVYTLPPSREEMTKNQVSLTCLVKGFYPSDIAVEWESNGQP |
| | | ENNYKTTPPMLDSDGSFFLYSKLTVDKSRWQQGNVFSCSVMHE |
| | | ALHNHYTQKSLSLSPGK |
| 213 | IgG2.3-E137A-S1381 | ASTKGPSVFPLAPCSRSTSAITAALGCLVKDYFPEPVTVSWNSGA |
| | | LTSGVHTFPAVLQSSGLYSLSSVVTVPSSNFGTQTYTCNVDHKPS |
| | | NTKVDKTVERKSCVECPPCPAPPVAGPSVFLFPPKPKDTLMISRT |
| | | PEVTCVVVDVSHEDPEVQFNWYVDGVEVHNAKTKPREEQFNST |
| | | FRVVSVLTVVHQDWLNGKEYKCKVSNKGLPAPIEKTISKTKGQP |
| | | REPQVYTLPPSREEMTKNQVSLTCLVKGFYPSDIAVEWESNGQP |
| | | ENNYKTTPPMLDSDGSFFLYSKLTVDKSRWQQGNVFSCSVMHE |
| | | ALHNHYTQKSLSLSPGK |
| 214 | IgG2.3-E137I-S138A | ASTKGPSVFPLAPCSRSTSIATAALGCLVKDYFPEPVTVSWNSGA |
| | | LTSGVHTFPAVLQSSGLYSLSSVVTVPSSNFGTQTYTCNVDHKPS |
| | | NTKVDKTVERKSCVECPPCPAPPVAGPSVFLFPPKPKDTLMISRT |
| | | PEVTCVVVDVSHEDPEVQFNWYVDGVEVHNAKTKPREEQFNST |
| | | FRVVSVLTVVHQDWLNGKEYKCKVSNKGLPAPIEKTISKTKGQP |
| | | REPQVYTLPPSREEMTKNQVSLTCLVKGFYPSDIAVEWESNGQP |
| | | ENNYKTTPPMLDSDGSFFLYSKLTVDKSRWQQGNVFSCSVMHE |
| | | ALHNHYTQKSLSLSPGK |
| 215 | IgG2.3-R217G | ASTKGPSVFPLAPCSRSTSESTAALGCLVKDYFPEPVTVSWNSGA |
| | | LTSGVHTFPAVLQSSGLYSLSSVVTVPSSNFGTQTYTCNVDHKPS |
| | | NTKVDKTVEGKSCVECPPCPAPPVAGPSVFLFPPKPKDTLMISRT |
| | | PEVTCVVVDVSHEDPEVQFNWYVDGVEVHNAKTKPREEQFNST |
| | | FRVVSVLTVVHQDWLNGKEYKCKVSNKGLPAPIEKTISKTKGQP |
| | | REPQVYTLPPSREEMTKNQVSLTCLVKGFYPSDIAVEWESNGQP |
| | | ENNYKTTPPMLDSDGSFFLYSKLTVDKSRWQQGNVFSCSVMHE |
| | | ALHNHYTQKSLSLSPGK |
| 216 | IgG2.3-R217A | ASTKGPSVFPLAPCSRSTSESTAALGCLVKDYFPEPVTVSWNSGA |
| | | LTSGVHTFPAVLQSSGLYSLSSVVTVPSSNFGTQTYTCNVDHKPS |
| | | NTKVDKTVEAKSCVECPPCPAPPVAGPSVFLFPPKPKDTLMISRT |
| | | PEVTCVVVDVSHEDPEVQFNWYVDGVEVHNAKTKPREEQFNST |
| | | FRVVSVLTVVHQDWLNGKEYKCKVSNKGLPAPIEKTISKTKGQP |
| | | REPQVYTLPPSREEMTKNQVSLTCLVKGFYPSDIAVEWESNGQP |
| | | ENNYKTTPPMLDSDGSFFLYSKLTVDKSRWQQGNVFSCSVMHE |
| | | ALHNHYTQKSLSLSPGK |
| 217 | IgG2.3-R217I | ASTKGPSVFPLAPCSRSTSESTAALGCLVKDYFPEPVTVSWNSGA |
| | | LTSGVHTFPAVLQSSGLYSLSSVVTVPSSNFGTQTYTCNVDHKPS |
| | | NTKVDKTVEIKSCVECPPCPAPPVAGPSVFLFPPKPKDTLMISRTP |
| | | EVTCVVVDVSHEDPEVQFNWYVDGVEVHNAKTKPREEQFNSTF |
| | | RVVSVLTVVHQDWLNGKEYKCKVSNKGLPAPIEKTISKTKGQP |
| | | REPQVYTLPPSREEMTKNQVSLTCLVKGFYPSDIAVEWESNGQP |
| | | ENNYKTTPPMLDSDGSFFLYSKLTVDKSRWQQGNVFSCSVMHE |
| | | ALHNHYTQKSLSLSPGK |
| 218 | IgG2.3-R217E | ASTKGPSVFPLAPCSRSTSESTAALGCLVKDYFPEPVTVSWNSGA |
| | | LTSGVHTFPAVLQSSGLYSLSSVVTVPSSNFGTQTYTCNVDHKPS |
| | | NTKVDKTVEEKSCVECPPCPAPPVAGPSVFLFPPKPKDTLMISRT |
| | | PEVTCVVVDVSHEDPEVQFNWYVDGVEVHNAKTKPREEQFNST |
| | | FRVVSVLTVVHQDWLNGKEYKCKVSNKGLPAPIEKTISKTKGQP |
| | | REPQVYTLPPSREEMTKNQVSLTCLVKGFYPSDIAVEWESNGQP |
| | | ENNYKTTPPMLDSDGSFFLYSKLTVDKSRWQQGNVFSCSVMHE |
| | | ALHNHYTQKSLSLSPGK |
| 219 | IgG2.3-R217K | ASTKGPSVFPLAPCSRSTSESTAALGCLVKDYFPEPVTVSWNSGA |
| | | LTSGVHTFPAVLQSSGLYSLSSVVTVPSSNFGTQTYTCNVDHKPS |
| | | NTKVDKTVEKKSCVECPPCPAPPVAGPSVFLFPPKPKDTLMISRT |
| | | PEVTCVVVDVSHEDPEVQFNWYVDGVEVHNAKTKPREEQFNST |
| | | FRVVSVLTVVHQDWLNGKEYKCKVSNKGLPAPIEKTISKTKGQP |
| | | REPQVYTLPPSREEMTKNQVSLTCLVKGFYPSDIAVEWESNGQP |
| | | ENNYKTTPPMLDSDGSFFLYSKLTVDKSRWQQGNVFSCSVMHE |
| | | ALHNHYTQKSLSLSPGK |
| 220 | IgG2.3-V224I | ASTKGPSVFPLAPCSRSTSESTAALGCLVKDYFPEPVTVSWNSGA |
| | | LTSGVHTFPAVLQSSGLYSLSSVVTVPSSNFGTQTYTCNVDHKPS |
| | | NTKVDKTVERKSCIECPPCPAPPVAGPSVFLFPPKPKDTLMISRTP |
| | | EVTCVVVDVSHEDPEVQFNWYVDGVEVHNAKTKPREEQFNSTF |
| | | RVVSVLTVVHQDWLNGKEYKCKVSNKGLPAPIEKTISKTKGQP |
| | | REPQVYTLPPSREEMTKNQVSLTCLVKGFYPSDIAVEWESNGQP |
| | | ENNYKTTPPMLDSDGSFFLYSKLTVDKSRWQQGNVFSCSVMHE |
| | | ALHNHYTQKSLSLSPGK |
| 221 | IgG2.3-E225D | ASTKGPSVFPLAPCSRSTSESTAALGCLVKDYFPEPVTVSWNSGA |
| | | LTSGVHTFPAVLQSSGLYSLSSVVTVPSSNFGTQTYTCNVDHKPS |
| | | NTKVDKTVERKSCVDCPPCPAPPVAGPSVFLFPPKPKDTLMISRT |
| | | PEVTCVVVDVSHEDPEVQFNWYVDGVEVHNAKTKPREEQFNST |
| | | FRVVSVLTVVHQDWLNGKEYKCKVSNKGLPAPIEKTISKTKGQP |
| | | REPQVYTLPPSREEMTKNQVSLTCLVKGFYPSDIAVEWESNGQP |
| | | ENNYKTTPPMLDSDGSFFLYSKLTVDKSRWQQGNVFSCSVMHE |
| | | ALHNHYTQKSLSLSPGK |
| 222 | IgG2-G4.1-G4-G4 | ASTKGPSVFPLAPCSRSTSESTAALGCLVKDYFPEPVTVSWNSGA |
| | | LTSGVHTFPAVLQSSGLYSLSSVVTVPSSNFGTQTYTCNVDHKPS |
| | | NTKVDKTVERKYGPPCPPCPAPEFLGGPSVFLFPPKPKDTLMISR |
| | | TPEVTCVVVDVSQEDPEVQFNWYVDGVEVHNAKTKPREEQFNS |
| | | TYRVVSVLTVLHQDWLNGKEYKCKVSNKGLPSSIEKTISKAKGQ |
| | | PREPQVYTLPPSQEEMTKNQVSLTCLVKGFYPSDIAVEWESNGQ |
| | | PENNYKTTPPVLDSDGSFFLYSRLTVDKSRWQEGNVFSCSVMHE |
| | | ALHNHYTQKSLSLSLGK |
| 223 | IgG4-G2.3-G2-G2 | ASTKGPSVFPLAPCSRSTSESTAALGCLVKDYFPEPVTVSWNSGA |
| | | LTSGVHTFPAVLQSSGLYSLSSVVTVPSSSLGTKTYTCNVDHKPS |
| | | NTKVDKRVESKSCVECPPCPAPPVAGPSVFLFPPKPKDTLMISRT |
| | | PEVTCVVVDVSHEDPEVQFNWYVDGVEVHNAKTKPREEQFNST |
| | | FRVVSVLTVVHQDWLNGKEYKCKVSNKGLPAPIEKTISKTKGQP |
| | | REPQVYTLPPSREEMTKNQVSLTCLVKGFYPSDIAVEWESNGQP |
| | | ENNYKTTPPMLDSDGSFFLYSKLTVDKSRWQQGNVFSCSVMHE |
| | | ALHNHYTQKSLSLSPGK |
| 224 | IgG2-G4.1-G2-G2 | ASTKGPSVFPLAPCSRSTSESTAALGCLVKDYFPEPVTVSWNSGA |
| | | LTSGVHTFPAVLQSSGLYSLSSVVTVPSSNFGTQTYTCNVDHKPS |
| | | NTKVDKTVERKYGPPCPPCPAPEFLGGPSVFLFPPKPKDTLMISR |
| | | TPEVTCVVVDVSHEDPEVQFNWYVDGVEVHNAKTKPREEQFNS |
| | | TFRVVSVLTVVHQDWLNGKEYKCKVSNKGLPAPIEKTISKTKGQ |
| | | PREPQVYTLPPSREEMTKNQVSLTCLVKGFYPSDIAVEWESNGQ |
| | | PENNYKTTPPMLDSDGSFFLYSKLTVDKSRWQQGNVFSCSVMH |
| | | EALHNHYTQKSLSLSPGK |
| 225 | IgG4-G2.3-G4-G4 | ASTKGPSVFPLAPCSRSTSESTAALGCLVKDYFPEPVTVSWNSGA |
| | | LTSGVHTFPAVLQSSGLYSLSSVVTVPSSSLGTKTYTCNVDHKPS |
| | | NTKVDKRVESKSCVECPPCPAPPVAGPSVFLFPPKPKDTLMISRT |
| | | PEVTCVVVDVSQEDPEVQFNWYVDGVEVHNAKTKPREEQFNST |
| | | YRVVSVLTVLHQDWLNGKEYKCKVSNKGLPSSIEKTISKAKGQP |
| | | REPQVYTLPPSQEEMTKNQVSLTCLVKGFYPSDIAVEWESNGQP |
| | | ENNYKTTPPVLDSDGSFFLYSRLTVDKSRWQEGNVFSCSVMHE |
| | | ALHNHYTQKSLSLSLGK |
| 226 | IgG2-G2.3-G4-G4 | ASTKGPSVFPLAPCSRSTSESTAALGCLVKDYFPEPVTVSWNSGA |
| | | LTSGVHTFPAVLQSSGLYSLSSVVTVPSSNFGTQTYTCNVDHKPS |
| | | NTKVDKTVERKSCVECPPCPAPPVAGPSVFLFPPKPKDTLMISRT |
| | | PEVTCVVVDVSQEDPEVQFNWYVDGVEVHNAKTKPREEQFNST |
| | | YRVVSVLTVLHQDWLNGKEYKCKVSNKGLPSSIEKTISKAKGQP |
| | | REPQVYTLPPSQEEMTKNQVSLTCLVKGFYPSDIAVEWESNGQP |
| | | ENNYKTTPPVLDSDGSFFLYSRLTVDKSRWQEGNVFSCSVMHE |
| | | ALHNHYTQKSLSLSLGK |
| 227 | IgG4-G4.1-G2-G2 | ASTKGPSVFPLAPCSRSTSESTAALGCLVKDYFPEPVTVSWNSGA |
| | | LTSGVHTFPAVLQSSGLYSLSSVVTVPSSSLGTKTYTCNVDHKPS |
| | | NTKVDKRVESKYGPPCPPCPAPEFLGGPSVFLFPPKPKDTLMISR |
| | | TPEVTCVVVDVSHEDPEVQFNWYVDGVEVHNAKTKPREEQFNS |
| | | TFRVVSVLTVVHQDWLNGKEYKCKVSNKGLPAPIEKTISKTKGQ |
| | | PREPQVYTLPPSREEMTKNQVSLTCLVKGFYPSDIAVEWESNGQ |
| | | PENNYKTTPPMLDSDGSFFLYSKLTVDKSRWQQGNVFSCSVMH |
| | | EALHNHYTQKSLSLSPGK |
| 228 | IgG4-G4.1-G1-G1 | ASTKGPSVFPLAPCSRSTSESTAALGCLVKDYFPEPVTVSWNSGA |
| | | LTSGVHTFPAVLQSSGLYSLSSVVTVPSSSLGTKTYTCNVDHKPS |
| | | NTKVDKRVESKYGPPCPPCPAPEFLGGPSVFLFPPKPKDTLMISR |
| | | TPEVTCVVVDVSHEDPEVKFNWYVDGVEVHNAKTKPREEQYN |
| | | STYRVVSVLTVLHQDWLNGKEYKCKVSNKALPAPIEKTISKAKG |
| | | QPREPQVYTLPPSREEMTKNQVSLTCLVKGFYPSDIAVEWESNG |
| | | QPENNYKTTPPVLDSDGSFFLYSKLTVDKSRWQQGNVFSCSVM |
| | | HEALHNHYTQKSLSLSPGK |
| 229 | IgG4.1 | ASTKGPSVFPLAPCSRSTSESTAALGCLVKDYFPEPVTVSWNSGA |
| | | LTSGVHTFPAVLQSSGLYSLSSVVTVPSSSLGTKTYTCNVDHKPS |
| | | NTKVDKRVESKYGPPCPPCPAPEFLGGPSVFLFPPKPKDTLMISR |
| | | TPEVTCVVVDVSQEDPEVQFNWYVDGVEVHNAKTKPREEQFNS |
| | | TYRVVSVLTVLHQDWLNGKEYKCKVSNKGLPSSIEKTISKAKGQ |
| | | PREPQVYTLPPSQEEMTKNQVSLTCLVKGFYPSDIAVEWESNGQ |
| | | PENNYKTTPPVLDSDGSFFLYSRLTVDKSRWQEGNVFSCSVMHE |
| | | ALHNHYTQKSLSLSLGK |
| 230 | IgG4.1-R214T | ASTKGPSVFPLAPCSRSTSESTAALGCLVKDYFPEPVTVSWNSGA |
| | | LTSGVHTFPAVLQSSGLYSLSSVVTVPSSSLGTKTYTCNVDHKPS |
| | | NTKVDKTVESKYGPPCPPCPAPEFLGGPSVFLFPPKPKDTLMISR |
| | | TPEVTCVVVDVSQEDPEVQFNWYVDGVEVHNAKTKPREEQFNS |
| | | TYRVVSVLTVLHQDWLNGKEYKCKVSNKGLPSSIEKTISKAKGQ |
| | | PREPQVYTLPPSQEEMTKNQVSLTCLVKGFYPSDIAVEWESNGQ |
| | | PENNYKTTPPVLDSDGSFFLYSRLTVDKSRWQEGNVFSCSVMHE |
| | | ALHNHYTQKSLSLSLGK |
| 231 | IgG4.1-S217R | ASTKGPSVFPLAPCSRSTSESTAALGCLVKDYFPEPVTVSWNSGA |
| | | LTSGVHTFPAVLQSSGLYSLSSVVTVPSSSLGTKTYTCNVDHKPS |
| | | NTKVDKRVERKYGPPCPPCPAPEFLGGPSVFLFPPKPKDTLMISR |
| | | TPEVTCVVVDVSQEDPEVQFNWYVDGVEVHNAKTKPREEQFNS |
| | | TYRVVSVLTVLHQDWLNGKEYKCKVSNKGLPSSIEKTISKAKGQ |
| | | PREPQVYTLPPSQEEMTKNQVSLTCLVKGFYPSDIAVEWESNGQ |
| | | PENNYKTTPPVLDSDGSFFLYSRLTVDKSRWQEGNVFSCSVMHE |
| | | ALHNHYTQKSLSLSLGK |
| 232 | IgG4.1-S217P | ASTKGPSVFPLAPCSRSTSESTAALGCLVKDYFPEPVTVSWNSGA |
| | | LTSGVHTFPAVLQSSGLYSLSSVVTVPSSSLGTKTYTCNVDHKPS |
| | | NTKVDKRVEPKYGPPCPPCPAPEFLGGPSVFLFPPKPKDTLMISR |
| | | TPEVTCVVVDVSQEDPEVQFNWYVDGVEVHNAKTKPREEQFNS |
| | | TYRVVSVLTVLHQDWLNGKEYKCKVSNKGLPSSIEKTISKAKGQ |
| | | PREPQVYTLPPSQEEMTKNQVSLTCLVKGFYPSDIAVEWESNGQ |
| | | PENNYKTTPPVLDSDGSFFLYSRLTVDKSRWQEGNVFSCSVMHE |
| | | ALHNHYTQKSLSLSLGK |
| 233 | IgG1fa | ASTKGPSVFPLAPSSKSTSGGTAALGCLVKDYFPEPVTVSWNSG |
| | | ALTSGVHTFPAVLQSSGLYSLSSVVTVPSSSLGTQTYICNVNHKP |
| | | SNTKVDKRVEPKSCDKTHTCPPCPAPELLGGPSVFLFPPKPKDTL |
| | | MISRTPEVTCVVVDVSHEDPEVKFNWYVDGVEVHNAKTKPREE |
| | | QYNSTYRVVSVLTVLHQDWLNGKEYKCKVSNKALPAPIEKTISK |
| | | AKGQPREPQVYTLPPSRDELTKNQVSLTCLVKGFYPSDIAVEWE |
| | | SNGQPENNYKTTPPVLDSDGSFFLYSKLTVDKSRWQQGNVFSCS |
| | | VMHEALHNHYTQKSLSLSPG |
| 234 | IgG1.3fa | ASTKGPSVFPLAPSSKSTSGGTAALGCLVKDYFPEPVTVSWNSG |
| | | ALTSGVHTFPAVLQSSGLYSLSSVVTVPSSSLGTQTYICNVNHKP |
| | | SNTKVDKRVEPKSCDKTHTCPPCPAPEAEGAPSVFLFPPKPKDTL |
| | | MISRTPEVTCVVVDVSHEDPEVKFNWYVDGVEVHNAKTKPREE |
| | | QYNSTYRVVSVLTVLHQDWLNGKEYKCKVSNKALPAPIEKTISK |
| | | AKGQPREPQVYTLPPSRDELTKNQVSLTCLVKGFYPSDIAVEWE |
| | | SNGQPENNYKTTPPVLDSDGSFFLYSKLTVDKSRWQQGNVFSCS |
| | | VMHEALHNHYTQKSLSLSPGK |
| 235 | IgG1fa-P238K | ASTKGPSVFPLAPSSKSTSGGTAALGCLVKDYFPEPVTVSWNSG |
| | | ALTSGVHTFPAVLQSSGLYSLSSVVTVPSSSLGTQTYICNVNHKP |
| | | SNTKVDKRVEPKSCDKTHTCPPCPAPELLGGKSVFLFPPKPKDTL |
| | | MISRTPEVTCVVVDVSHEDPEVKFNWYVDGVEVHNAKTKPREE |
| | | QYNSTYRVVSVLTVLHQDWLNGKEYKCKVSNKALPAPIEKTISK |
| | | AKGQPREPQVYTLPPSRDELTKNQVSLTCLVKGFYPSDIAVEWE |
| | | SNGQPENNYKTTPPVLDSDGSFFLYSKLTVDKSRWQQGNVFSCS |
| | | VMHEALHNHYTQKSLSLSPGK |
| 236 | IgG1.3fa-P238K | ASTKGPSVFPLAPSSKSTSGGTAALGCLVKDYFPEPVTVSWNSG |
| | | ALTSGVHTFPAVLQSSGLYSLSSVVTVPSSSLGTQTYICNVNHKP |
| | | SNTKVDKRVEPKSCDKTHTCPPCPAPEAEGAKSVFLFPPKPKDT |
| | | LMISRTPEVTCVVVDVSHEDPEVKFNWYVDGVEVHNAKTKPRE |
| | | EQYNSTYRVVSVLTVLHQDWLNGKEYKCKVSNKALPAPIEKTIS |
| | | KAKGQPREPQVYTLPPSRDELTKNQVSLTCLVKGFYPSDIAVEW |
| | | ESNGQPENNYKTTPPVLDSDGSFFLYSKLTVDKSRWQQGNVFSC |
| | | SVMHEALHNHYTQKSLSLSPGK |
| 237 | IgG1fa-L235E-P238K | ASTKGPSVFPLAPSSKSTSGGTAALGCLVKDYFPEPVTVSWNSG |
| | | ALTSGVHTFPAVLQSSGLYSLSSVVTVPSSSLGTQTYICNVNHKP |
| | | SNTKVDKRVEPKSCDKTHTCPPCPAPELEGGKSVFLFPPKPKDTL |
| | | MISRTPEVTCVVVDVSHEDPEVKFNWYVDGVEVHNAKTKPREE |
| | | QYNSTYRVVSVLTVLHQDWLNGKEYKCKVSNKALPAPIEKTISK |
| | | AKGQPREPQVYTLPPSRDELTKNQVSLTCLVKGFYPSDIAVEWE |
| | | SNGQPENNYKTTPPVLDSDGSFFLYSKLTVDKSRWQQGNVFSCS |
| | | VMHEALHNHYTQKSLSLSPGK |
| 238 | IgG1fa-L235A-P238K | ASTKGPSVFPLAPSSKSTSGGTAALGCLVKDYFPEPVTVSWNSG |
| | | ALTSGVHTFPAVLQSSGLYSLSSVVTVPSSSLGTQTYICNVNHKP |
| | | SNTKVDKRVEPKSCDKTHTCPPCPAPELAGGKSVFLFPPKPKDT |
| | | LMISRTPEVTCVVVDVSHEDPEVKFNWYVDGVEVHNAKTKPRE |
| | | EQYNSTYRVVSVLTVLHQDWLNGKEYKCKVSNKALPAPIEKTIS |
| | | KAKGQPREPQVYTLPPSRDELTKNQVSLTCLVKGFYPSDIAVEW |
| | | ESNGQPENNYKTTPPVLDSDGSFFLYSKLTVDKSRWQQGNVFSC |
| | | SVMHEALHNHYTQKSLSLSPGK |
| 239 | IgG1fa-L235E-P238K-K322A | ASTKGPSVFPLAPSSKSTSGGTAALGCLVKDYFPEPVTVSWNSG |
| | | ALTSGVHTFPAVLQSSGLYSLSSVVTVPSSSLGTQTYICNVNHKP |
| | | SNTKVDKRVEPKSCDKTHTCPPCPAPELEGGKSVFLFPPKPKDTL |
| | | MISRTPEVTCVVVDVSHEDPEVKFNWYVDGVEVHNAKTKPREE |
| | | QYNSTYRVVSVLTVLHQDWLNGKEYKCAVSNKALPAPIEKTISK |
| | | AKGQPREPQVYTLPPSRDELTKNQVSLTCLVKGFYPSDIAVEWE |
| | | SNGQPENNYKTTPPVLDSDGSFFLYSKLTVDKSRWQQGNVFSCS |
| | | VMHEALHNHYTQKSLSLSPGK |
| 240 | IgG2.3 | ASTKGPSVFPLAPCSRSTSESTAALGCLVKDYFPEPVTVSWNSGA |
| | | LTSGVHTFPAVLQSSGLYSLSSVVTVPSSNFGTQTYTCNVDHKPS |
| | | NTKVDKTVERKSCVECPPCPAPPVAGPSVFLFPPKPKDTLMISRT |
| | | PEVTCVVVDVSHEDPEVQFNWYVDGVEVHNAKTKPREEQFNST |
| | | FRVVSVLTVVHQDWLNGKEYKCKVSNKGLPAPIEKTISKTKGQP |
| | | REPQVYTLPPSREEMTKNQVSLTCLVKGFYPSDIAVEWESNGQP |
| | | ENNYKTTPPMLDSDGSFFLYSKLTVDKSRWQQGNVFSCSVMHE |
| | | ALHNHYTQKSLSLSPGK |
| 241 | IgG2.3-P238K | ASTKGPSVFPLAPCSRSTSESTAALGCLVKDYFPEPVTVSWNSGA |
| | | LTSGVHTFPAVLQSSGLYSLSSVVTVPSSNFGTQTYTCNVDHKPS |
| | | NTKVDKTVERKSCVECPPCPAPPVAGKSVFLFPPKPKDTLMISRT |
| | | PEVTCVVVDVSHEDPEVQFNWYVDGVEVHNAKTKPREEQFNST |
| | | FRVVSVLTVVHQDWLNGKEYKCKVSNKGLPAPIEKTISKTKGQP |
| | | REPQVYTLPPSREEMTKNQVSLTCLVKGFYPSDIAVEWESNGQP |
| | | ENNYKTTPPMLDSDGSFFLYSKLTVDKSRWQQGNVFSCSVMHE |
| | | ALHNHYTQKSLSLSPGK |
| 242 | IgG2.3G1 | ASTKGPSVFPLAPCSRSTSESTAALGCLVKDYFPEPVTVSWNSGA |
| | | LTSGVHTFPAVLQSSGLYSLSSVVTVPSSNFGTQTYTCNVDHKPS |
| | | NTKVDKTVERKSCVECPPCPAPELLGGPSVFLFPPKPKDTLMISR |
| | | TPEVTCVVVDVSHEDPEVKFNWYVDGVEVHNAKTKPREEQYN |
| | | STYRVVSVLTVLHQDWLNGKEYKCKVSNKALPAPIEKTISKAKG |
| | | QPREPQVYTLPPSREEMTKNQVSLTCLVKGFYPSDIAVEWESNG |
| | | QPENNYKTTPPVLDSDGSFFLYSKLTVDKSRWQQGNVFSCSVM |
| | | HEALHNHYTQKSLSLSPGK |
| 243 | IgG2.3G1-P238K | ASTKGPSVFPLAPCSRSTSESTAALGCLVKDYFPEPVTVSWNSGA |
| | | LTSGVHTFPAVLQSSGLYSLSSVVTVPSSNFGTQTYTCNVDHKPS |
| | | NTKVDKTVERKSCVECPPCPAPELLGGKSVFLFPPKPKDTLMISR |
| | | TPEVTCVVVDVSHEDPEVKFNWYVDGVEVHNAKTKPREEQYN |
| | | STYRVVSVLTVLHQDWLNGKEYKCKVSNKALPAPIEKTISKAKG |
| | | QPREPQVYTLPPSREEMTKNQVSLTCLVKGFYPSDIAVEWESNG |
| | | QPENNYKTTPPVLDSDGSFFLYSKLTVDKSRWQQGNVFSCSVM |
| | | HEALHNHYTQKSLSLSPGK |
| 244 | IgG2.3G1-L235E-P238K | ASTKGPSVFPLAPCSRSTSESTAALGCLVKDYFPEPVTVSWNSGA |
| | | LTSGVHTFPAVLQSSGLYSLSSVVTVPSSNFGTQTYTCNVDHKPS |
| | | NTKVDKTVERKSCVECPPCPAPELEGGKSVFLFPPKPKDTLMISR |
| | | TPEVTCVVVDVSHEDPEVKFNWYVDGVEVHNAKTKPREEQYN |
| | | STYRVVSVLTVLHQDWLNGKEYKCKVSNKALPAPIEKTISKAKG |
| | | QPREPQVYTLPPSREEMTKNQVSLTCLVKGFYPSDIAVEWESNG |
| | | QPENNYKTTPPVLDSDGSFFLYSKLTVDKSRWQQGNVFSCSVM |
| | | HEALHNHYTQKSLSLSPGK |
| 245 | IgG2.5G1-P238K | ASTKGPSVFPLAPSSRSTSESTAALGCLVKDYFPEPVTVSWNSGA |
| | | LTSGVHTFPAVLQSSGLYSLSSVVTVPSSNFGTQTYTCNVDHKPS |
| | | NTKVDKTVERKCCVECPPCPAPELLGGKSVFLFPPKPKDTLMISR |
| | | TPEVTCVVVDVSHEDPEVKFNWYVDGVEVHNAKTKPREEQYN |
| | | STYRVVSVLTVLHQDWLNGKEYKCKVSNKALPAPIEKTISKAKG |
| | | QPREPQVYTLPPSREEMTKNQVSLTCLVKGFYPSDIAVEWESNG |
| | | QPENNYKTTPPVLDSDGSFFLYSKLTVDKSRWQQGNVFSCSVM |
| | | HEALHNHYTQKSLSLSPGK |
| 246 | hIgG1f | ASTKGPSVFPLAPSSKSTSGGTAALGCLVKDYFPEPVTVSWNSG |
| | | ALTSGVHTFPAVLQSSGLYSLSSVVTVPSSSLGTQTYICNVNHKP |
| | | SNTKVDKRVEPKSCDKTHTCPPCPAPELLGGPSVFLFPPKPKDTL |
| | | MISRTPEVTCVVVDVSHEDPEVKFNWYVDGVEVHNAKTKPREE |
| | | QYNSTYRVVSVLTVLHQDWLNGKEYKCKVSNKALPAPIEKTISK |
| | | AKGQPREPQVYTLPPSREEMTKNQVSLTCLVKGFYPSDIAVEWE |
| | | SNGQPENNYKTTPPVLDSDGSFFLYSKLTVDKSRWQQGNVFSCS |
| | | VMHEALHNHYTQKSLSLSPGK |
| 247 | hIgG1f-P238K | ASTKGPSVFPLAPSSKSTSGGTAALGCLVKDYFPEPVTVSWNSG |
| | | ALTSGVHTFPAVLQSSGLYSLSSVVTVPSSSLGTQTYICNVNHKP |
| | | SNTKVDKRVEPKSCDKTHTCPPCPAPELLGGKSVFLFPPKPKDTL |
| | | MISRTPEVTCVVVDVSHEDPEVKFNWYVDGVEVHNAKTKPREE |
| | | QYNSTYRVVSVLTVLHQDWLNGKEYKCKVSNKALPAPIEKTISK |
| | | AKGQPREPQVYTLPPSREEMTKNQVSLTCLVKGFYPSDIAVEWE |
| | | SNGQPENNYKTTPPVLDSDGSFFLYSKLTVDKSRWQQGNVFSCS |
| | | VMHEALHNHYTQKSLSLSPGK |
| 248 | hIgG1.3f | ASTKGPSVFPLAPSSKSTSGGTAALGCLVKDYFPEPVTVSWNSG |
| | | ALTSGVHTFPAVLQSSGLYSLSSVVTVPSSSLGTQTYICNVNHKP |
| | | SNTKVDKRVEPKSCDKTHTCPPCPAPEAEGAPSVFLFPPKPKDTL |
| | | MISRTPEVTCVVVDVSHEDPEVKFNWYVDGVEVHNAKTKPREE |
| | | QYNSTYRVVSVLTVLHQDWLNGKEYKCKVSNKALPAPIEKTISK |
| | | AKGQPREPQVYTLPPSREEMTKNQVSLTCLVKGFYPSDIAVEWE |
| | | SNGQPENNYKTTPPVLDSDGSFFLYSKLTVDKSRWQQGNVFSCS |
| | | VMHEALHNHYTQKSLSLSPGK |
| 249 | hIgG1.3f-P238K | ASTKGPSVFPLAPSSKSTSGGTAALGCLVKDYFPEPVTVSWNSG |
| | | ALTSGVHTFPAVLQSSGLYSLSSVVTVPSSSLGTQTYICNVNHKP |
| | | SNTKVDKRVEPKSCDKTHTCPPCPAPEAEGAKSVFLFPPKPKDT |
| | | LMISRTPEVTCVVVDVSHEDPEVKFNWYVDGVEVHNAKTKPRE |
| | | EQYNSTYRVVSVLTVLHQDWLNGKEYKCKVSNKALPAPIEKTIS |
| | | KAKGQPREPQVYTLPPSREEMTKNQVSLTCLVKGFYPSDIAVEW |
| | | ESNGQPENNYKTTPPVLDSDGSFFLYSKLTVDKSRWQQGNVFSC |
| | | SVMHEALHNHYTQKSLSLSPGK |
| 250 | hIgG1f-L235E-P238K | ASTKGPSVFPLAPSSKSTSGGTAALGCLVKDYFPEPVTVSWNSG |
| | | ALTSGVHTFPAVLQSSGLYSLSSVVTVPSSSLGTQTYICNVNHKP |
| | | SNTKVDKRVEPKSCDKTHTCPPCPAPELEGGKSVFLFPPKPKDTL |
| | | MISRTPEVTCVVVDVSHEDPEVKFNWYVDGVEVHNAKTKPREE |
| | | QYNSTYRVVSVLTVLHQDWLNGKEYKCKVSNKALPAPIEKTISK |
| | | AKGQPREPQVYTLPPSREEMTKNQVSLTCLVKGFYPSDIAVEWE |
| | | SNGQPENNYKTTPPVLDSDGSFFLYSKLTVDKSRWQQGNVFSCS |
| | | VMHEALHNHYTQKSLSLSPGK |
| 251 | hIgG1f-L235E-P238K-K322A | ASTKGPSVFPLAPSSKSTSGGTAALGCLVKDYFPEPVTVSWNSG |
| | | ALTSGVHTFPAVLQSSGLYSLSSVVTVPSSSLGTQTYICNVNHKP |
| | | SNTKVDKRVEPKSCDKTHTCPPCPAPELEGGKSVFLFPPKPKDTL |
| | | MISRTPEVTCVVVDVSHEDPEVKFNWYVDGVEVHNAKTKPREE |
| | | QYNSTYRVVSVLTVLHQDWLNGKEYKCAVSNKALPAPIEKTISK |
| | | AKGQPREPQVYTLPPSREEMTKNQVSLTCLVKGFYPSDIAVEWE |
| | | SNGQPENNYKTTPPVLDSDGSFFLYSKLTVDKSRWQQGNVFSCS |
| | | VMHEALHNHYTQKSLSLSPGK |
| 252 | IgG2.3G1.3f | ASTKGPSVFPLAPCSRSTSESTAALGCLVKDYFPEPVTVSWNSGA |
| | | LTSGVHTFPAVLQSSGLYSLSSVVTVPSSNFGTQTYTCNVDHKPS |
| | | NTKVDKTVERKSCVECPPCPAPEAEGAPSVFLFPPKPKDTLMISR |
| | | TPEVTCVVVDVSHEDPEVKFNWYVDGVEVHNAKTKPREEQYN |
| | | STYRVVSVLTVLHQDWLNGKEYKCKVSNKALPAPIEKTISKAKG |
| | | QPREPQVYTLPPSREEMTKNQVSLTCLVKGFYPSDIAVEWESNG |
| | | QPENNYKTTPPVLDSDGSFFLYSKLTVDKSRWQQGNVFSCSVM |
| | | HEALHNHYTQKSLSLSPGK |
| 253 | IgG2.3G1.3f-P238K | ASTKGPSVFPLAPCSRSTSESTAALGCLVKDYFPEPVTVSWNSGA |
| | | LTSGVHTFPAVLQSSGLYSLSSVVTVPSSNFGTQTYTCNVDHKPS |
| | | NTKVDKTVERKSCVECPPCPAPEAEGAKSVFLFPPKPKDTLMISR |
| | | TPEVTCVVVDVSHEDPEVKFNWYVDGVEVHNAKTKPREEQYN |
| | | STYRVVSVLTVLHQDWLNGKEYKCKVSNKALPAPIEKTISKAKG |
| | | QPREPQVYTLPPSREEMTKNQVSLTCLVKGFYPSDIAVEWESNG |
| | | QPENNYKTTPPVLDSDGSFFLYSKLTVDKSRWQQGNVFSCSVM |
| | | HEALHNHYTQKSLSLSPGK |
| 244 | IgG2.3G1-L235E-P238K | ASTKGPSVFPLAPCSRSTSESTAALGCLVKDYFPEPVTVSWNSGA |
| | | LTSGVHTFPAVLQSSGLYSLSSVVTVPSSNFGTQTYTCNVDHKPS |
| | | NTKVDKTVERKSCVECPPCPAPELEGGKSVFLFPPKPKDTLMISR |
| | | TPEVTCVVVDVSHEDPEVKFNWYVDGVEVHNAKTKPREEQYN |
| | | STYRVVSVLTVLHQDWLNGKEYKCKVSNKALPAPIEKTISKAKG |
| | | QPREPQVYTLPPSREEMTKNQVSLTCLVKGFYPSDIAVEWESNG |
| | | QPENNYKTTPPVLDSDGSFFLYSKLTVDKSRWQQGNVFSCSVM |
| | | HEALHNHYTQKSLSLSPGK |
| 254 | IgG2.3G1-L235E-P238K- | ASTKGPSVFPLAPCSRSTSESTAALGCLVKDYFPEPVTVSWNSGA |
| | K322A | LTSGVHTFPAVLQSSGLYSLSSVVTVPSSNFGTQTYTCNVDHKPS |
| | | NTKVDKTVERKSCVECPPCPAPELEGGKSVFLFPPKPKDTLMISR |
| | | TPEVTCVVVDVSHEDPEVKFNWYVDGVEVHNAKTKPREEQYN |
| | | STYRVVSVLTVLHQDWLNGKEYKCAVSNKALPAPIEKTISKAKG |
| | | QPREPQVYTLPPSREEMTKNQVSLTCLVKGFYPSDIAVEWESNG |
| | | QPENNYKTTPPVLDSDGSFFLYSKLTVDKSRWQQGNVFSCSVM |
| | | HEALHNHYTQKSLSLSPGK |
| 255 | IgG2.5 | ASTKGPSVFPLAPSSRSTSESTAALGCLVKDYFPEPVTVSWNSGA |
| | | LTSGVHTFPAVLQSSGLYSLSSVVTVPSSNFGTQTYTCNVDHKPS |
| | | NTKVDKTVERKCCVECPPCPAPPVAGPSVFLFPPKPKDTLMISRT |
| | | PEVTCVVVDVSHEDPEVQFNWYVDGVEVHNAKTKPREEQFNST |
| | | FRVVSVLTVVHQDWLNGKEYKCKVSNKGLPAPIEKTISKTKGQP |
| | | REPQVYTLPPSREEMTKNQVSLTCLVKGFYPSDIAVEWESNGQP |
| | | ENNYKTTPPMLDSDGSFFLYSKLTVDKSRWQQGNVFSCSVMHE |
| | | ALHNHYTQKSLSLSPGK |
| 256 | IgG2.5-P238K | ASTKGPSVFPLAPSSRSTSESTAALGCLVKDYFPEPVTVSWNSGA |
| | | LTSGVHTFPAVLQSSGLYSLSSVVTVPSSNFGTQTYTCNVDHKPS |
| | | NTKVDKTVERKCCVECPPCPAPPVAGKSVFLFPPKPKDTLMISRT |
| | | PEVTCVVVDVSHEDPEVQFNWYVDGVEVHNAKTKPREEQFNST |
| | | FRVVSVLTVVHQDWLNGKEYKCKVSNKGLPAPIEKTISKTKGQP |
| | | REPQVYTLPPSREEMTKNQVSLTCLVKGFYPSDIAVEWESNGQP |
| | | ENNYKTTPPMLDSDGSFFLYSKLTVDKSRWQQGNVFSCSVMHE |
| | | ALHNHYTQKSLSLSPGK |
| 257 | IgG2.5G1 | ASTKGPSVFPLAPSSRSTSESTAALGCLVKDYFPEPVTVSWNSGA |
| | | LTSGVHTFPAVLQSSGLYSLSSVVTVPSSNFGTQTYTCNVDHKPS |
| | | NTKVDKTVERKCCVECPPCPAPELLGGPSVFLFPPKPKDTLMISR |
| | | TPEVTCVVVDVSHEDPEVKFNWYVDGVEVHNAKTKPREEQYN |
| | | STYRVVSVLTVLHQDWLNGKEYKCKVSNKALPAPIEKTISKAKG |
| | | QPREPQVYTLPPSREEMTKNQVSLTCLVKGFYPSDIAVEWESNG |
| | | QPENNYKTTPPVLDSDGSFFLYSKLTVDKSRWQQGNVFSCSVM |
| | | HEALHNHYTQKSLSLSPGK |
| 258 | IgG2.5G1-P238K | ASTKGPSVFPLAPSSRSTSESTAALGCLVKDYFPEPVTVSWNSGA |
| | | LTSGVHTFPAVLQSSGLYSLSSVVTVPSSNFGTQTYTCNVDHKPS |
| | | NTKVDKTVERKCCVECPPCPAPELLGGKSVFLFPPKPKDTLMISR |
| | | TPEVTCVVVDVSHEDPEVKFNWYVDGVEVHNAKTKPREEQYN |
| | | STYRVVSVLTVLHQDWLNGKEYKCKVSNKALPAPIEKTISKAKG |
| | | QPREPQVYTLPPSREEMTKNQVSLTCLVKGFYPSDIAVEWESNG |
| | | QPENNYKTTPPVLDSDGSFFLYSKLTVDKSRWQQGNVFSCSVM |
| | | HEALHNHYTQKSLSLSPGK |
| 259 | IgG2.5G1.3f | ASTKGPSVFPLAPSSRSTSESTAALGCLVKDYFPEPVTVSWNSGA |
| | | LTSGVHTFPAVLQSSGLYSLSSVVTVPSSNFGTQTYTCNVDHKPS |
| | | NTKVDKTVERKCCVECPPCPAPEAEGAPSVFLFPPKPKDTLMISR |
| | | TPEVTCVVVDVSHEDPEVKFNWYVDGVEVHNAKTKPREEQYN |
| | | STYRVVSVLTVLHQDWLNGKEYKCKVSNKALPAPIEKTISKAKG |
| | | QPREPQVYTLPPSREEMTKNQVSLTCLVKGFYPSDIAVEWESNG |
| | | QPENNYKTTPPVLDSDGSFFLYSKLTVDKSRWQQGNVFSCSVM |
| | | HEALHNHYTQKSLSLSPGK |
| 260 | IgG2.5G1.3f-P238K | ASTKGPSVFPLAPSSRSTSESTAALGCLVKDYFPEPVTVSWNSGA |
| | | LTSGVHTFPAVLQSSGLYSLSSVVTVPSSNFGTQTYTCNVDHKPS |
| | | NTKVDKTVERKCCVECPPCPAPEAEGAKSVFLFPPKPKDTLMIS |
| | | RTPEVTCVVVDVSHEDPEVKFNWYVDGVEVHNAKTKPREEQY |
| | | NSTYRVVSVLTVLHQDWLNGKEYKCKVSNKALPAPIEKTISKAK |
| | | GQPREPQVYTLPPSREEMTKNQVSLTCLVKGFYPSDIAVEWESN |
| | | GQPENNYKTTPPVLDSDGSFFLYSKLTVDKSRWQQGNVFSCSV |
| | | MHEALHNHYTQKSLSLSPGK |
| 261 | IgG2.5G1-L235E-P238K | ASTKGPSVFPLAPSSRSTSESTAALGCLVKDYFPEPVTVSWNSGA |
| | | LTSGVHTFPAVLQSSGLYSLSSVVTVPSSNFGTQTYTCNVDHKPS |
| | | NTKVDKTVERKCCVECPPCPAPELEGGKSVFLFPPKPKDTLMISR |
| | | TPEVTCVVVDVSHEDPEVKFNWYVDGVEVHNAKTKPREEQYN |
| | | STYRVVSVLTVLHQDWLNGKEYKCKVSNKALPAPIEKTISKAKG |
| | | QPREPQVYTLPPSREEMTKNQVSLTCLVKGFYPSDIAVEWESNG |
| | | QPENNYKTTPPVLDSDGSFFLYSKLTVDKSRWQQGNVFSCSVM |
| | | HEALHNHYTQKSLSLSPGK |
| 262 | IgG2.5G1-L235E-P238K- | ASTKGPSVFPLAPSSRSTSESTAALGCLVKDYFPEPVTVSWNSGA |
| | K322A | LTSGVHTFPAVLQSSGLYSLSSVVTVPSSNFGTQTYTCNVDHKPS |
| | | NTKVDKTVERKCCVECPPCPAPELEGGKSVFLFPPKPKDTLMISR |
| | | TPEVTCVVVDVSHEDPEVKFNWYVDGVEVHNAKTKPREEQYN |
| | | STYRVVSVLTVLHQDWLNGKEYKCAVSNKALPAPIEKTISKAKG |
| | | QPREPQVYTLPPSREEMTKNQVSLTCLVKGFYPSDIAVEWESNG |
| | | QPENNYKTTPPVLDSDGSFFLYSKLTVDKSRWQQGNVFSCSVM |
| | | HEALHNHYTQKSLSLSPGK |
| 263 | 3h56-269-IgG4.1 | EVQLLESGGGLVQPGGSLRLSCAASGFTFRDYEMWWVRQAPGKGLER |
| | OR | VSA |
| | BMS-986090 | INPQGTRTYYADSVKGRFTISRDNSKNTLYLQMNSLRAEDTAVYYCAKLP |
| | | FRFSDRGQGTLVTVSSASTESKYGPPCPPCPAPEFLGGPSVFLFPPKPKD |
| | | TLMISRTPEVTCVVVDVSQEDPEVQFNWYVDGVEVHNAKTKPREEQF |
| | | NST |
| | | YRVVSVLTVLHQDWLNGKEYKCKVSNKGLPSSIEKTISKAKGQPREPQVY |
| | | TLPPSQEEMTKNQVSLTCLVKGFYPSDIAVEWESNGQPENNYKTTPPVL |
| | | D |
| | | SDGSFFLYSRLTVDKSRWQEGNVFSCSVMHEALHNHYTQKSLSLSLGK |
| 264 | 3h56-269-CT | EVQLLESGGGLVQPGGSLRLSCAASGFTFRDYEMWWVRQAPGKGLER |
| | | VSA |
| | | INPQGTRTYYADSVKGRFTISRDNSKNTLYLQMNSLRAEDTAVYYCAKLP |
| | | FRFSDRGQGTLVTVSSASTEPKSSDKTHTSPPSPAPELLGGSSVFLFPPK |
| | | PKDTLMISRTPEVTCVVVDVSHEDPEVKFNWYVDGVEVHNAKTKPREE |
| | | QY |
| | | NSTYRVVSVLTVLHQDWLNGKEYKCKVSNKALPAPIEKTISKAKGQPREP |
| | | QVYTLPPSRDELTKNQVSLTCLVKGFYPSDIAVEWESNGQPENNYKTTP |
| | | P |
| | | VLDSDGSFFLYSKLTVDKSRWQQGNVFSCSVMHEALHNHYTQKSLSLSP |
| | | GK |
| 265 | 3h56-269-IgG1.1f | EVQLLESGGGLVQPGGSLRLSCAASGFTFRDYEMWWVRQAPGKGLER |
| | | VSAINPQGTRTYYADSVKGRFTISRDNSKNTLYLQMNSLRAEDTAVYYC |
| | | AKLPFRFSDRGQGTLVTVSSASTEPKSCDKTHTCPPCPAPEAEGAPSVFL |
| | | FPPKPKDTLMISRTPEVTCVVVDVSHEDPEVKFNWYVDGVEVHNAKTK |
| | | PREEQYNSTYRVVSVLTVLHQDWLNGKEYKCKVSNKALPSSIEKTISKAK |
| | | GQPREPQVYTLPPSREEMTKNQVSLTCLVKGFYPSDIAVEWESNGQPE |
| | | NNYKTTPPVLDSDGSFFLYSKLTVDKSRWQQGNVFSCSVMHEALHNHY |
| | | TQKSLSLSPGK |
| 266 | 3h56-269-IgG1.3f | EVQLLESGGGLVQPGGSLRLSCAASGFTFRDYEMWWVRQAPGKGLER |
| | | VSAINPQGTRTYYADSVKGRFTISRDNSKNTLYLQMNSLRAEDTAVYYC |
| | | AKLPFRFSDRGQGTLVTVSSASTEPKSCDKTHTCPPCPAPEAEGAPSVFL |
| | | FPPKPKDTLMISRTPEVTCVVVDVSHEDPEVKFNWYVDGVEVHNAKTK |
| | | PREEQYNSTYRVVSVLTVLHQDWLNGKEYKCKVSNKALPAPIEKTISKAK |
| | | GQPREPQVYTLPPSREEMTKNQVSLTCLVKGFYPSDIAVEWESNGQPE |
| | | NNYKTTPPVLDSDGSFFLYSKLTVDKSRWQQGNVFSCSVMHEALHNHY |
| | | TQKSLSLSPGK |
| 267 | 3h56-269-IgG1-D265A | EVQLLESGGGLVQPGGSLRLSCAASGFTFRDYEMWWVRQAPGKGLER |
| | | VSAINPQGTRTYYADSVKGRFTISRDNSKNTLYLQMNSLRAEDTAVYYC |
| | | AKLPFRFSDRGQGTLVTVSSASTEPKSCDKTHTCPPCPAPELLGGPSVFLF |
| | | PPKPKDTLMISRTPEVTCVVVAVSHEDPEVKFNWYVDGVEVHNAKTKP |
| | | REEQYNSTYRVVSVLTVLHQDWLNGKEYKCKVSNKALPAPIEKTISKAKG |
| | | QPREPQVYTLPPSREEMTKNQVSLTCLVKGFYPSDIAVEWESNGQPEN |
| | | NYKTTPPVLDSDGSFFLYSKLTVDKSRWQQGNVFSCSVMHEALHNHYT |
| | | QKSLSLSPGK |
| 268 | 1F4 Heavy chain variable | EVQLLESGGGLVQPGGSLRLSCAASGFTFSIYAMSWVRQA |
| | region and CH1 | PGKGLEWVSAISDSGGRTYFADSVRGRFTISRDNSKNTLSL |
| | | QMNSLRAEDTAVYYCAKVDYSNYLFFDYWGQGTLVTVS |
| | | SASTKGPSVFPLAPSSKSTSGGTAALGCLVKDYFPEPVTVS |
| | | WNSGALTSGVHTFPAVLQSSGLYSLSSVVTVPSSSLGTQT |
| | | YICNVNHKPSNTKVDKRV |
| 269 | 1F4 Light chain variable | EIVLTQSPGTLSLSPGERATLSCRASQSISSSYLAWYQQKPG |
| | region and CL | QAPRLLIYGASSRATGIPDRFSGSGSGTDFTLTISRLEPEDF |
| | | AVYYCQQYGSSPYTFGQGTKLEIKRTVAAPSVFIFPPSDEQ |
| | | LKSGTASVVCLLNNFYPREAKVQWKVDNALQSGNSQESV |
| | | TEQDSKDSTYSLSSTLTLSKADYEKHKVYACEVTHQGLSS |
| | | PVTKSFNRGEC |
| 270 | 1F4-IgG1f heavy chain | EVQLLESGGGLVQPGGSLRLSCAASGFTFSIYAMSWVRQA |
| | | PGKGLEWVSAISDSGGRTYFADSVRGRFTISRDNSKNTLSL |
| | | QMNSLRAEDTAVYYCAKVDYSNYLFFDYWGQGTLVTVS |
| | | SASTKGPSVFPLAPSSKSTSGGTAALGCLVKDYFPEPVTVS |
| | | WNSGALTSGVHTFPAVLQSSGLYSLSSVVTVPSSSLGTQT |
| | | YICNVNHKPSNTKVDKRVEPKSCDKTHTCPPCPAPELLGG |
| | | PSVFLFPPKPKDTLMISRTPEVTCVVVDVSHEDPEVKFNW |
| | | YVDGVEVHNAKTKPREEQYNSTYRVVSVLTVLHQDWLN |
| | | GKEYKCKVSNKALPAPIEKTISKAKGQPREPQVYTLPPSRE |
| | | EMTKNQVSLTCLVKGFYPSDIAVEWESNGQPENNYKTTPP |
| | | VLDSDGSFFLYSKLTVDKSRWQQGNVFSCSVMHEALHNH |
| | | YTQKSLSLSPGK |
| 271 | 1F4-IgG4.1 heavy chain | EVQLLESGGGLVQPGGSLRLSCAASGFTFSIYAMSWVRQA |
| | | PGKGLEWVSAISDSGGRTYFADSVRGRFTISRDNSKNTLSL |
| | | QMNSLRAEDTAVYYCAKVDYSNYLFFDYWGQGTLVTVS |
| | | SASTKGPSVFPLAPCSRSTSESTAALGCLVKDYFPEPVTVS |
| | | WNSGALTSGVHTFPAVLQSSGLYSLSSVVTVPSSSLGTKT |
| | | YTCNVDHKPSNTKVDKRVESKYGPPCPPCPAPEFLGGPSV |
| | | FLFPPKPKDTLMISRTPEVTCVVVDVSQEDPEVQFNWYVD |
| | | GVEVHNAKTKPREEQFNSTYRVVSVLTVLHQDWLNGKEY |
| | | KCKVSNKGLPSSIEKTISKAKGQPREPQVYTLPPSQEEMTK |
| | | NQVSLTCLVKGFYPSDIAVEWESNGQPENNYKTTPPVLDS |
| | | DGSFFLYSRLTVDKSRWQEGNVFSCSVMHEALHNHYTQK |
| | | SLSLSLG |
| 272 | 1F4-IgG1.1f heavy chain | EVQLLESGGGLVQPGGSLRLSCAASGFTFSIYAMSWVRQA |
| | | PGKGLEWVSAISDSGGRTYFADSVRGRFTISRDNSKNTLSL |
| | | QMNSLRAEDTAVYYCAKVDYSNYLFFDYWGQGTLVTVS |
| | | SASTKGPSVFPLAPSSKSTSGGTAALGCLVKDYFPEPVTVS |
| | | WNSGALTSGVHTFPAVLQSSGLYSLSSVVTVPSSSLGTQT |
| | | YICNVNHKPSNTKVDKRVEPKSCDKTHTCPPCPAPEAEGA |
| | | PSVFLFPPKPKDTLMISRTPEVTCVVVDVSHEDPEVKFNW |
| | | YVDGVEVHNAKTKPREEQYNSTYRVVSVLTVLHQDWLN |
| | | GKEYKCKVSNKALPSSIEKTISKAKGQPREPQVYTLPPSRE |
| | | EMTKNQVSLTCLVKGFYPSDIAVEWESNGQPENNYKTTPP |
| | | VLDSDGSFFLYSKLTVDKSRWQQGNVFSCSVMHEALHNH |
| | | YTQKSLSLSPG |
| 273 | 1F4-IgG1.3f heavy chain | EVQLLESGGGLVQPGGSLRLSCAASGFTFSIYAMSWVRQA |
| | | PGKGLEWVSAISDSGGRTYFADSVRGRFTISRDNSKNTLSL |
| | | QMNSLRAEDTAVYYCAKVDYSNYLFFDYWGQGTLVTVS |
| | | SASTKGPSVFPLAPSSKSTSGGTAALGCLVKDYFPEPVTVS |
| | | WNSGALTSGVHTFPAVLQSSGLYSLSSVVTVPSSSLGTQT |
| | | YICNVNHKPSNTKVDKRVEPKSCDKTHTCPPCPAPEAEGA |
| | | PSVFLFPPKPKDTLMISRTPEVTCVVVDVSHEDPEVKFNW |
| | | YVDGVEVHNAKTKPREEQYNSTYRVVSVLTVLHQDWLN |
| | | GKEYKCKVSNKALPAPIEKTISKAKGQPREPQVYTLPPSRE |
| | | EMTKNQVSLTCLVKGFYPSDIAVEWESNGQPENNYKTTPP |
| | | VLDSDGSFFLYSKLTVDKSRWQQGNVFSCSVMHEALHNH |
| | | YTQKSLSLSPG |
| 274 | 1F4-D265A heavy chain | EVQLLESGGGLVQPGGSLRLSCAASGFTFSIYAMSWVRQA |
| | | GKGLEWVSAISDSGGRTYFADSVRGRFTISRDNSKNTLSL |
| | | QMNSLRAEDTAVYYCAKVDYSNYLFFDYWGQGTLVTVS |
| | | SASTKGPSVFPLAPSSKSTSGGTAALGCLVKDYFPEPVTVS |
| | | WNSGALTSGVHTFPAVLQSSGLYSLSSVVTVPSSSLGTQT |
| | | YICNVNHKPSNTKVDKRVEPKSCDKTHTCPPCPAPELLGG |
| | | PSVFLFPPKPKDTLMISRTPEVTCVVVAVSHEDPEVKFNW |
| | | YVDGVEVHNAKTKPREEQYNSTYRVVSVLTVLHQDWLN |
| | | GKEYKCKVSNKALPAPIEKTISKAKGQPREPQVYTLPPSRE |
| | | EMTKNQVSLTCLVKGFYPSDIVEWESNGQPENNYKTTPPV |
| | | LDSDGSFFLYSKLTVDKSRWQQGNVFSCSVMHEALHNHY |
| | | TQKSLSLSPGK |
| 275 | 1F4-CT heavy chain | EVQLLESGGGLVQPGGSLRLSCAASGFTFSIYAMSWVRQA |
| | | PGKGLEWVSAISDSGGRTYFADSVRGRFTISRDNSKNTLSL |
| | | QMNSLRAEDTAVYYCAKVDYSNYLFFDYWGQGTLVTVS |
| | | SASTKGPSVFPLAPSSKSTSGGTAALGCLVKDYFPEPVTVS |
| | | WNSGALTSGVHTFPAVLQSSGLYSLSSVVTVPSSSLGTQT |
| | | YICNVNHKPSNTKVDKRVEPKSCDKTHTSPPSPAPELLGGS |
| | | SVFLFPPKPKDTLMISRTPEVTCVVVDVSHEDPEVKFNWY |
| | | VDGVEVHNAKTKPREEQYNSTYRVVSVLTVLHQDWLNG |
| | | KEYKCKVSNKALPAPIEKTISKAKGQPREPQVYTLPPSRDE |
| | | LTKNQVSLTCLVKGFYPSDIAVEWESNGQPENNYKTTPPV |
| | | LDSDGSFFLYSKLTVDKSRWQQGNVFSCSVMHEALHNHY |
| | | TQKSLSLSPGK |

[0475] Those skilled in the art will recognize or be able to ascertain, using no more than routine experimentation, many equivalents of the specific embodiments described herein described herein. Such equivalents are intended to be encompassed by the following claims.

The application's sequence listing, which the Patent Office published only in electronic form, follows.

SEQUENCE LISTING (287 sequences)

SEQ ID NO: 1 - protein, 330 aa, Homo sapiens
  misc_feature (1)..(330): Full-length IgG1 wild-type
ASTKGPSVFPLAPSSKSTSGGTAALGCLVKDYFPEPVTVSWNSGALTSGVHTFPAVLQSSGLYSLSSVVTVPSSSLGTQTYICNVNHKPSNTKVDKKVEPKSCDKTHTCPPCPAPELLGGPSVFLFPPKPKDTLMISRTPEVTCVVVDVSHEDPEVKFNWYVDGVEVHNAKTKPREEQYNSTYRVVSVLTVLHQDWLNGKEYKCKVSNKALPAPIEKTISKAKGQPREPQVYTLPPSREEMTKNQVSLTCLVKGFYPSDIAVEWESNGQPENNYKTTPPVLDSDGSFFLYSKLTVDKSRWQQGNVFSCSVMHEALHNHYTQKSLSLSPGK

SEQ ID NO: 2 - protein, 98 aa, Homo sapiens
  misc_feature (1)..(98): CH1 IgG1 wild-type
ASTKGPSVFPLAPSSKSTSGGTAALGCLVKDYFPEPVTVSWNSGALTSGVHTFPAVLQSSGLYSLSSVVTVPSSSLGTQTYICNVNHKPSNTKVDKKV

SEQ ID NO: 3 - protein, 22 aa, Homo sapiens
  misc_feature (1)..(22): Hinge IgG1 wild-type
EPKSCDKTHTCPPCPAPELLGG

SEQ ID NO: 4 - protein, 103 aa, Homo sapiens
  misc_feature (1)..(103): CH2 IgG1 wild-type
PSVFLFPPKPKDTLMISRTPEVTCVVVDVSHEDPEVKFNWYVDGVEVHNAKTKPREEQYNSTYRVVSVLTVLHQDWLNGKEYKCKVSNKALPAPIEKTISKAK

SEQ ID NO: 5 - protein, 107 aa, Homo sapiens
  misc_feature (1)..(107): CH3 IgG1 wild-type
GQPREPQVYTLPPSREEMTKNQVSLTCLVKGFYPSDIAVEWESNGQPENNYKTTPPVLDSDGSFFLYSKLTVDKSRWQQGNVFSCSVMHEALHNHYTQKSLSLSPGK

SEQ ID NO: 6 - protein, 326 aa, Homo sapiens
  misc_feature (1)..(326): Full-length IgG2 wild-type
ASTKGPSVFPLAPCSRSTSESTAALGCLVKDYFPEPVTVSWNSGALTSGVHTFPAVLQSSGLYSLSSVVTVPSSNFGTQTYTCNVDHKPSNTKVDKTVERKCCVECPPCPAPPVAGPSVFLFPPKPKDTLMISRTPEVTCVVVDVSHEDPEVQFNWYVDGVEVHNAKTKPREEQFNSTFRVVSVLTVVHQDWLNGKEYKCKVSNKGLPAPIEKTISKTKGQPREPQVYTLPPSREEMTKNQVSLTCLVKGFYPSDIAVEWESNGQPENNYKTTPPMLDSDGSFFLYSKLTVDKSRWQQGNVFSCSVMHEALHNHYTQKSLSLSPGK

SEQ ID NO: 7 - protein, 98 aa, Homo sapiens
  misc_feature (1)..(98): CH1 IgG2 wild-type
ASTKGPSVFPLAPCSRSTSESTAALGCLVKDYFPEPVTVSWNSGALTSGVHTFPAVLQSSGLYSLSSVVTVPSSNFGTQTYTCNVDHKPSNTKVDKTV

SEQ ID NO: 8 - protein, 18 aa, Homo sapiens
  misc_feature (1)..(18): Hinge IgG2 wild-type
ERKCCVECPPCPAPPVAG

SEQ ID NO: 9 - protein, 103 aa, Homo sapiens
  misc_feature (1)..(103): CH2 IgG2 wild-type
PSVFLFPPKPKDTLMISRTPEVTCVVVDVSHEDPEVQFNWYVDGVEVHNAKTKPREEQFNSTFRVVSVLTVVHQDWLNGKEYKCKVSNKGLPAPIEKTISKTK

SEQ ID NO: 10 - protein, 107 aa, Homo sapiens
  misc_feature (1)..(107): CH3 IgG2 wild-type
GQPREPQVYTLPPSREEMTKNQVSLTCLVKGFYPSDIAVEWESNGQPENNYKTTPPMLDSDGSFFLYSKLTVDKSRWQQGNVFSCSVMHEALHNHYTQKSLSLSPGK

SEQ ID NO: 11 - protein, 377 aa, Homo sapiens
  misc_feature (1)..(377): Full-length IgG3 wild-type
ASTKGPSVFPLAPCSRSTSGGTAALGCLVKDYFPEPVTVSWNSGALTSGVHTFPAVLQSSGLYSLSSVVTVPSSSLGTQTYTCNVNHKPSNTKVDKRVELKTPLGDTTHTCPRCPEPKSCDTPPPCPRCPEPKSCDTPPPCPRCPEPKSCDTPPPCPRCPAPELLGGPSVFLFPPKPKDTLMISRTPEVTCVVVDVSHEDPEVQFKWYVDGVEVHNAKTKPREEQYNSTFRVVSVLTVLHQDWLNGKEYKCKVSNKALPAPIEKTISKTKGQPREPQVYTLPPSREEMTKNQVSLTCLVKGFYPSDIAVEWESSGQPENNYNTTPPMLDSDGSFFLYSKLTVDKSRWQQGNIFSCSVMHEALHNRFTQKSLSLSPGK

SEQ ID NO: 12 - protein, 98 aa, Homo sapiens
  misc_feature (1)..(98): CH1 IgG3 wild-type
ASTKGPSVFPLAPCSRSTSGGTAALGCLVKDYFPEPVTVSWNSGALTSGVHTFPAVLQSSGLYSLSSVVTVPSSSLGTQTYTCNVNHKPSNTKVDKRV

SEQ ID NO: 13 - protein, 18 aa, Homo sapiens
  misc_feature (1)..(18): Hinge IgG3 wild-type
ELKTPLGDTTHTCPRCPE

SEQ ID NO: 14 - protein, 154 aa, Homo sapiens
  misc_feature (1)..(154): CH2 IgG3 wild-type
PKSCDTPPPCPRCPEPKSCDTPPPCPRCPEPKSCDTPPPCPRCPAPELLGGPSVFLFPPKPKDTLMISRTPEVTCVVVDVSHEDPEVQFKWYVDGVEVHNAKTKPREEQYNSTFRVVSVLTVLHQDWLNGKEYKCKVSNKALPAPIEKTISKTK

SEQ ID NO: 15 - protein, 107 aa, Homo sapiens
  misc_feature (1)..(107): CH3 IgG3 wild-type
GQPREPQVYTLPPSREEMTKNQVSLTCLVKGFYPSDIAVEWESSGQPENNYNTTPPMLDSDGSFFLYSKLTVDKSRWQQGNIFSCSVMHEALHNRFTQKSLSLSPGK

SEQ ID NO: 16 - protein, 327 aa, Homo sapiens
  misc_feature (1)..(327): Full-length IgG4 wild-type
ASTKGPSVFPLAPCSRSTSESTAALGCLVKDYFPEPVTVSWNSGALTSGVHTFPAVLQSSGLYSLSSVVTVPSSSLGTKTYTCNVDHKPSNTKVDKRVESKYGPPCPSCPAPEFLGGPSVFLFPPKPKDTLMISRTPEVTCVVVDVSQEDPEVQFNWYVDGVEVHNAKTKPREEQFNSTYRVVSVLTVLHQDWLNGKEYKCKVSNKGLPSSIEKTISKAKGQPREPQVYTLPPSQEEMTKNQVSLTCLVKGFYPSDIAVEWESNGQPENNYKTTPPVLDSDGSFFLYSRLTVDKSRWQEGNVFSCSVMHEALHNHYTQKSLSLSLGK

SEQ ID NO: 17 - protein, 98 aa, Homo sapiens
  misc_feature (1)..(98): CH1 IgG4 wild-type
ASTKGPSVFPLAPCSRSTSESTAALGCLVKDYFPEPVTVSWNSGALTSGVHTFPAVLQSSGLYSLSSVVTVPSSSLGTKTYTCNVDHKPSNTKVDKRV

SEQ ID NO: 18 - protein, 19 aa, Homo sapiens
  misc_feature (1)..(19): Hinge IgG4 wild-type
ESKYGPPCPSCPAPEFLGG

SEQ ID NO: 19 - protein, 103 aa, Homo sapiens
  misc_feature (1)..(103): CH2 IgG4 wild-type
PSVFLFPPKPKDTLMISRTPEVTCVVVDVSQEDPEVQFNWYVDGVEVHNAKTKPREEQFNSTYRVVSVLTVLHQDWLNGKEYKCKVSNKGLPSSIEKTISKAK

SEQ ID NO: 20 - protein, 107 aa, Homo sapiens
  misc_feature (1)..(107): CH3 IgG4 wild-type
GQPREPQVYTLPPSQEEMTKNQVSLTCLVKGFYPSDIAVEWESNGQPENNYKTTPPVLDSDGSFFLYSRLTVDKSRWQEGNVFSCSVMHEALHNHYTQKSLSLSLGK

SEQ ID NO: 21 - protein, 18 aa, Artificial Sequence
  Synthetic: Modified IgG2 Hinge (C219S)
ERKSCVECPPCPAPPVAG

SEQ ID NO: 22 - protein, 19 aa, Artificial Sequence
  Synthetic: IgG2/IgG1 hybrid hinge
ERKCCVECPPCPAPELLGG

SEQ ID NO: 23 - protein, 19 aa, Artificial Sequence
  Synthetic: IgG2 C219S/IgG1 hybrid hinge
ERKSCVECPPCPAPELLGG

SEQ ID NO: 24 - protein, 103 aa, Artificial Sequence
  Synthetic: Modified CH2 IgG1 (A330S/P331S)
PSVFLFPPKPKDTLMISRTPEVTCVVVDVSHEDPEVKFNWYVDGVEVHNAKTKPREEQYNSTYRVVSVLTVLHQDWLNGKEYKCKVSNKALPSSIEKTISKAK

SEQ ID NO: 25 - protein, 22 aa, Artificial Sequence
  Synthetic: IgG1.1 Hinge (L234A/L235E/G237A)
EPKSCDKTHTCPPCPAPEAEGA

SEQ ID NO: 26 - protein, 326 aa, Artificial Sequence
  Synthetic: IgG1-IgG2-IgG1 (IgG1-IgG2/IgG1(SEQ#22)-IgG1-IgG1)
ASTKGPSVFPLAPSSKSTSGGTAALGCLVKDYFPEPVTVSWNSGALTSGVHTFPAVLQSSGLYSLSSVVTVPSSSLGTQTYICNVNHKPSNTKVDKKVERKCCVECPPCPAPELLGGPSVFLFPPKPKDTLMISRTPEVTCVVVDVSHEDPEVKFNWYVDGVEVHNAKTKPREEQYNSTYRVVSVLTVLHQDWLNGKEYKCKVSNKALPAPIEKTISKAKGQPREPQVYTLPPSREEMTKNQVSLTCLVKGFYPSDIAVEWESNGQPENNYKTTPPVLDSDGSFFLYSKLTVDKSRWQQGNVFSCSVMHEALHNHYTQKSLSLSPG

SEQ ID NO: 27 - protein, 325 aa, Artificial Sequence
  Synthetic: IgG1-IgG2-IgG12 (IgG1-IgG2(SEQ#8)-IgG1-IgG1)
ASTKGPSVFPLAPSSKSTSGGTAALGCLVKDYFPEPVTVSWNSGALTSGVHTFPAVLQSSGLYSLSSVVTVPSSSLGTQTYICNVNHKPSNTKVDKKVERKCCVECPPCPAPPVAGPSVFLFPPKPKDTLMISRTPEVTCVVVDVSHEDPEVKFNWYVDGVEVHNAKTKPREEQYNSTYRVVSVLTVLHQDWLNGKEYKCKVSNKALPAPIEKTISKAKGQPREPQVYTLPPSREEMTKNQVSLTCLVKGFYPSDIAVEWESNGQPENNYKTTPPVLDSDGSFFLYSKLTVDKSRWQQGNVFSCSVMHEALHNHYTQKSLSLSPG

SEQ ID NO: 28 - protein, 326 aa, Artificial Sequence
  Synthetic: IgG2-IgG1 (IgG2-IgG2/IgG1(SEQ#22)-IgG1-IgG1)
ASTKGPSVFPLAPCSRSTSESTAALGCLVKDYFPEPVTVSWNSGALTSGVHTFPAVLQSSGLYSLSSVVTVPSSNFGTQTYTCNVDHKPSNTKVDKTVERKCCVECPPCPAPELLGGPSVFLFPPKPKDTLMISRTPEVTCVVVDVSHEDPEVKFNWYVDGVEVHNAKTKPREEQYNSTYRVVSVLTVLHQDWLNGKEYKCKVSNKALPAPIEKTISKAKGQPREPQVYTLPPSREEMTKNQVSLTCLVKGFYPSDIAVEWESNGQPENNYKTTPPVLDSDGSFFLYSKLTVDKSRWQQGNVFSCSVMHEALHNHYTQKSLSLSPG

SEQ ID NO: 29 - protein, 325 aa, Artificial Sequence
  Synthetic: IgG2-IgG12 (IgG2-IgG2(SEQ#8)-IgG1-IgG1)
ASTKGPSVFPLAPCSRSTSESTAALGCLVKDYFPEPVTVSWNSGALTSGVHTFPAVLQSSGLYSLSSVVTVPSSNFGTQTYTCNVDHKPSNTKVDKTVERKCCVECPPCPAPPVAGPSVFLFPPKPKDTLMISRTPEVTCVVVDVSHEDPEVKFNWYVDGVEVHNAKTKPREEQYNSTYRVVSVLTVLHQDWLNGKEYKCKVSNKALPAPIEKTISKAKGQPREPQVYTLPPSREEMTKNQVSLTCLVKGFYPSDIAVEWESNGQPENNYKTTPPVLDSDGSFFLYSKLTVDKSRWQQGNVFSCSVMHEALHNHYTQKSLSLSPG

SEQ ID NO: 30 - protein, 325 aa, Artificial Sequence
  Synthetic: IgG1-IgG2-IgG1.1 (IgG1-IgG2(SEQ#8)-IgG1(A330S/P331S)-IgG1)
ASTKGPSVFPLAPSSKSTSGGTAALGCLVKDYFPEPVTVSWNSGALTSGVHTFPAVLQSSGLYSLSSVVTVPSSSLGTQTYICNVNHKPSNTKVDKKVERKCCVECPPCPAPPVAGPSVFLFPPKPKDTLMISRTPEVTCVVVDVSHEDPEVKFNWYVDGVEVHNAKTKPREEQYNSTYRVVSVLTVLHQDWLNGKEYKCKVSNKALPSSIEKTISKAKGQPREPQVYTLPPSREEMTKNQVSLTCLVKGFYPSDIAVEWESNGQPENNYKTTPPVLDSDGSFFLYSKLTVDKSRWQQGNVFSCSVMHEALHNHYTQKSLSLSPG

SEQ ID NO: 31 - protein, 326 aa, Artificial Sequence
  Synthetic: IgG2-IgG1.1 (IgG2-IgG2(SEQ#8)-IgG1(A330S/P331S)-IgG1)
ASTKGPSVFPLAPCSRSTSESTAALGCLVKDYFPEPVTVSWNSGALTSGVHTFPAVLQSSGLYSLSSVVTVPSSNFGTQTYTCNVDHKPSNTKVDKTVERKCCVECPPCPAPPVAGPSVFLFPPKPKDTLMISRTPEVTCVVVDVSHEDPEVKFNWYVDGVEVHNAKTKPREEQYNSTYRVVSVLTVLHQDWLNGKEYKCKVSNKALPSSIEKTISKAKGQPREPQVYTLPPSREEMTKNQVSLTCLVKGFYPSDIAVEWESNGQPENNYKTTPPVLDSDGSFFLYSKLTVDKSRWQQGNVFSCSVMHEALHNHYTQKSLSLSPGK

SEQ ID NO: 32 - protein, 325 aa, Artificial Sequence
  Synthetic: IgG1-IgG2CS-IgG1 (IgG1-IgG2(C219S)-IgG1-IgG1)
ASTKGPSVFPLAPSSKSTSGGTAALGCLVKDYFPEPVTVSWNSGALTSGVHTFPAVLQSSGLYSLSSVVTVPSSSLGTQTYICNVNHKPSNTKVDKKVERKSCVECPPCPAPPVAGPSVFLFPPKPKDTLMISRTPEVTCVVVDVSHEDPEVKFNWYVDGVEVHNAKTKPREEQYNSTYRVVSVLTVLHQDWLNGKEYKCKVSNKALPAPIEKTISKAKGQPREPQVYTLPPSREEMTKNQVSLTCLVKGFYPSDIAVEWESNGQPENNYKTTPPVLDSDGSFFLYSKLTVDKSRWQQGNVFSCSVMHEALHNHYTQKSLSLSPG

SEQ ID NO: 33 - protein, 325 aa, Artificial Sequence; identical to SEQ ID NO: 32
  Synthetic: IgG1-IgG2CS-IgG12 (IgG1-IgG2(C219S)-IgG1-IgG1)

SEQ ID NO: 34 - protein, 325 aa, Artificial Sequence
  Synthetic: IgG2CS-IgG1 (IgG2-IgG2(C219S)-IgG1-IgG1)
ASTKGPSVFPLAPCSRSTSESTAALGCLVKDYFPEPVTVSWNSGALTSGVHTFPAVLQSSGLYSLSSVVTVPSSNFGTQTYTCNVDHKPSNTKVDKTVERKSCVECPPCPAPPVAGPSVFLFPPKPKDTLMISRTPEVTCVVVDVSHEDPEVKFNWYVDGVEVHNAKTKPREEQYNSTYRVVSVLTVLHQDWLNGKEYKCKVSNKALPAPIEKTISKAKGQPREPQVYTLPPSREEMTKNQVSLTCLVKGFYPSDIAVEWESNGQPENNYKTTPPVLDSDGSFFLYSKLTVDKSRWQQGNVFSCSVMHEALHNHYTQKSLSLSPG

SEQ ID NO: 35 - protein, 325 aa, Artificial Sequence; identical to SEQ ID NO: 34
  Synthetic: IgG2CS-IgG12 (IgG2-IgG2(C219S)-IgG1-IgG1)

SEQ ID NO: 36 - protein, 325 aa, Artificial Sequence
  Synthetic: IgG1-IgG2CS-IgG1.1 (IgG1-IgG2(C219S)-IgG1(A330S/P331S)-IgG1)
ASTKGPSVFPLAPSSKSTSGGTAALGCLVKDYFPEPVTVSWNSGALTSGVHTFPAVLQSSGLYSLSSVVTVPSSSLGTQTYICNVNHKPSNTKVDKKVERKSCVECPPCPAPPVAGPSVFLFPPKPKDTLMISRTPEVTCVVVDVSHEDPEVKFNWYVDGVEVHNAKTKPREEQYNSTYRVVSVLTVLHQDWLNGKEYKCKVSNKALPSSIEKTISKAKGQPREPQVYTLPPSREEMTKNQVSLTCLVKGFYPSDIAVEWESNGQPENNYKTTPPVLDSDGSFFLYSKLTVDKSRWQQGNVFSCSVMHEALHNHYTQKSLSLSPG

SEQ ID NO: 37 - protein, 325 aa, Artificial Sequence
  Synthetic: IgG2CS-IgG1.1 (IgG2-IgG2(C219S)-IgG1(A330S/P331S)-IgG1)
ASTKGPSVFPLAPCSRSTSESTAALGCLVKDYFPEPVTVSWNSGALTSGVHTFPAVLQSSGLYSLSSVVTVPSSNFGTQTYTCNVDHKPSNTKVDKTVERKSCVECPPCPAPPVAGPSVFLFPPKPKDTLMISRTPEVTCVVVDVSHEDPEVKFNWYVDGVEVHNAKTKPREEQYNSTYRVVSVLTVLHQDWLNGKEYKCKVSNKALPSSIEKTISKAKGQPREPQVYTLPPSREEMTKNQVSLTCLVKGFYPSDIAVEWESNGQPENNYKTTPPVLDSDGSFFLYSKLTVDKSRWQQGNVFSCSVMHEALHNHYTQKSLSLSPG

SEQ ID NO: 38 - protein, 121 aa, Artificial Sequence
  Synthetic: Ab 11F11 VH
QVQLVESGGGVVQPGRSLRLSCATSGFTFSNYGMHWVRQAPGKGLEWVAVILYDGSNKYYPDSVKGRFTISRDNSKNTLYLQMNSLRAEDTAVYYCARGGSSWYPDSFDIWGQGTMVTVSS

SEQ ID NO: 39 - protein, 120 aa, Artificial Sequence
  Synthetic: Ab 4C3 VH
EVQLVESGGGLVQPGRSLRLSCAASGFTFDDYAMHWVRQAPGKGLEWVSGISWKSGSIGYADSVKGRFTISRDNAKNSLYLQMNSLRAEDTALYYCVKGYYVILTGLDYWGQGTLVTVSS

SEQ ID NO: 40 - protein, 121 aa, Artificial Sequence
  Synthetic: Ab CD73.10 VH
QVQLVESGGGVVQPGRSLRLSCAASGFTFSNYGMHWVRQAPGKGLEWVAVIWYDESNKYYPDSVKGRFTISRDNSKNTLYLQMNSLRAEDTAVYYCARGGSSWYPDSFDIWGQGTMVTVSS

SEQ ID NO: 41 - protein, 120 aa, Artificial Sequence
  Synthetic: Ab CD73.3 VH  (4C3 / V94A)
EVQLVESGGGLVQPGRSLRLSCAASGFTFDDYAMHWVRQAPGKGLEWVSGISWKSGSIGYADSVKGRFTISRDNAKNSLYLQMNSLRAEDTVLYYCVKGYYVILTGLDYWGQGTLVTVSS

SEQ ID NO: 42 - protein, 121 aa, Artificial Sequence
  Synthetic: Ab 6E11 VH
EVQLVESGGALVQPGRSLRLSCAASGFTFDDYAMHWVRQAPGKGLEWVSGITWNSGGIGYADSVKGRFTISRDNAKNSLYLQMNSLRAEDTALYYCAKDRYYSSWLLFDNWGQGILVTVSS

SEQ ID NO: 43 - protein, 121 aa, Artificial Sequence
  Synthetic: Ab CD73.4 VH
QVQLVESGGGVVQPGRSLRLSCAASGFTFSNYGMHWVRQAPGKGLEWVAVILYDGSNKYYPDSVKGRFTISRDNSKNTLYLQMNSLRAEDTAVYYCARGGSSWYPDSFDIWGQGTMVTVSS

SEQ ID NO: 44 - protein, 447 aa, Artificial Sequence
  Synthetic: Ab 11F11 full-length HC
QVQLVESGGGVVQPGRSLRLSCATSGFTFSNYGMHWVRQAPGKGLEWVAVILYDGSNKYYPDSVKGRFTISRDNSKNTLYLQMNSLRAEDTAVYYCARGGSSWYPDSFDIWGQGTMVTVSSASTKGPSVFPLAPCSRSTSESTAALGCLVKDYFPEPVTVSWNSGALTSGVHTFPAVLQSSGLYSLSSVVTVPSSNFGTQTYTCNVDHKPSNTKVDKTVERKCCVECPPCPAPPVAGPSVFLFPPKPKDTLMISRTPEVTCVVVDVSHEDPEVQFNWYVDGVEVHNAKTKPREEQFNSTFRVVSVLTVVHQDWLNGKEYKCKVSNKGLPAPIEKTISKTKGQPREPQVYTLPPSREEMTKNQVSLTCLVKGFYPSDIAVEWESNGQPENNYKTTPPMLDSDGSFFLYSKLTVDKSRWQQGNVFSCSVMHEALHNHYTQKSLSLSPGK

SEQ ID NO: 45 - protein, 450 aa, Artificial Sequence
  Synthetic: Ab 4C3 full-length HC
EVQLVESGGGLVQPGRSLRLSCAASGFTFDDYAMHWVRQAPGKGLEWVSGISWKSGSIGYADSVKGRFTISRDNAKNSLYLQMNSLRAEDTALYYCVKGYYVILTGLDYWGQGTLVTVSSASTKGPSVFPLAPSSKSTSGGTAALGCLVKDYFPEPVTVSWNSGALTSGVHTFPAVLQSSGLYSLSSVVTVPSSSLGTQTYICNVNHKPSNTKVDKKVEPKSCDKTHTCPPCPAPELLGGPSVFLFPPKPKDTLMISRTPEVTCVVVDVSHEDPEVKFNWYVDGVEVHNAKTKPREEQYNSTYRVVSVLTVLHQDWLNGKEYKCKVSNKALPAPIEKTISKAKGQPREPQVYTLPPSRDELTKNQVSLTCLVKGFYPSDIAVEWESNGQPENNYKTTPPVLDSDGSFFLYSKLTVDKSRWQQGNVFSCSVMHEALHNHYTQKSLSLSPGK

SEQ ID NO: 46 - protein, 451 aa, Artificial Sequence
  Synthetic: Ab 6E11 full-length HC
EVQLVESGGALVQPGRSLRLSCAASGFTFDDYAMHWVRQAPGKGLEWVSGITWNSGGIGYADSVKGRFTISRDNAKNSLYLQMNSLRAEDTALYYCAKDRYYSSWLLFDNWGQGILVTVSSASTKGPSVFPLAPSSKSTSGGTAALGCLVKDYFPEPVTVSWNSGALTSGVHTFPAVLQSSGLYSLSSVVTVPSSSLGTQTYICNVNHKPSNTKVDKKVEPKSCDKTHTCPPCPAPELLGGPSVFLFPPKPKDTLMISRTPEVTCVVVDVSHEDPEVKFNWYVDGVEVHNAKTKPREEQYNSTYRVVSVLTVLHQDWLNGKEYKCKVSNKALPAPIEKTISKAKGQPREPQVYTLPPSRDELTKNQVSLTCLVKGFYPSDIAVEWESNGQPENNYKTTPPVLDSDGSFFLYSKLTVDKSRWQQGNVFSCSVMHEALHNHYTQKSLSLSPGK

SEQ ID NO: 47 - protein, 446 aa, Artificial Sequence
  Synthetic: Ab CD73.10-IgG2-C219S full-length HC
QVQLVESGGGVVQPGRSLRLSCAASGFTFSNYGMHWVRQAPGKGLEWVAVIWYDESNKYYPDSVKGRFTISRDNSKNTLYLQMNSLRAEDTAVYYCARGGSSWYPDSFDIWGQGTMVTVSSASTKGPSVFPLAPCSRSTSESTAALGCLVKDYFPEPVTVSWNSGALTSGVHTFPAVLQSSGLYSLSSVVTVPSSNFGTQTYTCNVDHKPSNTKVDKTVERKSCVECPPCPAPPVAGPSVFLFPPKPKDTLMISRTPEVTCVVVDVSHEDPEVQFNWYVDGVEVHNAKTKPREEQFNSTFRVVSVLTVVHQDWLNGKEYKCKVSNKGLPAPIEKTISKTKGQPREPQVYTLPPSREEMTKNQVSLTCLVKGFYPSDIAVEWESNGQPENNYKTTPPMLDSDGSFFLYSKLTVDKSRWQQGNVFSCSVMHEALHNHYTQKSLSLSPG

SEQ ID NO: 48 - protein, 446 aa, Artificial Sequence
  Synthetic: Ab CD73.10-IgG2-C219S-IgG1.1 full-length HC
QVQLVESGGGVVQPGRSLRLSCAASGFTFSNYGMHWVRQAPGKGLEWVAVIWYDESNKYYPDSVKGRFTISRDNSKNTLYLQMNSLRAEDTAVYYCARGGSSWYPDSFDIWGQGTMVTVSSASTKGPSVFPLAPCSRSTSESTAALGCLVKDYFPEPVTVSWNSGALTSGVHTFPAVLQSSGLYSLSSVVTVPSSNFGTQTYTCNVDHKPSNTKVDKTVERKSCVECPPCPAPPVAGPSVFLFPPKPKDTLMISRTPEVTCVVVDVSHEDPEVKFNWYVDGVEVHNAKTKPREEQYNSTYRVVSVLTVLHQDWLNGKEYKCKVSNKALPSSIEKTISKAKGQPREPQVYTLPPSREEMTKNQVSLTCLVKGFYPSDIAVEWESNGQPENNYKTTPPMLDSDGSFFLYSKLTVDKSRWQQGNVFSCSVMHEALHNHYTQKSLSLSPG

SEQ ID NO: 49 - protein, 450 aa, Artificial Sequence
  Synthetic: Ab CD73.10-IgG1.1 full-length HC   (IgG1.1 IgG1.1(L234A/L235E/G237A)-IgG1.1(A330S/P331S)-IgG1.1)
QVQLVESGGGVVQPGRSLRLSCAASGFTFSNYGMHWVRQAPGKGLEWVAVIWYDESNKYYPDSVKGRFTISRDNSKNTLYLQMNSLRAEDTAVYYCARGGSSWYPDSFDIWGQGTMVTVSSASTKGPSVFPLAPSSKSTSGGTAALGCLVKDYFPEPVTVSWNSGALTSGVHTFPAVLQSSGLYSLSSVVTVPSSSLGTQTYICNVNHKPSNTKVDKKVEPKSCDKTHTCPPCPAPEAEGAPSVFLFPPKPKDTLMISRTPEVTCVVVDVSHEDPEVKFNWYVDGVEVHNAKTKPREEQYNSTYRVVSVLTVLHQDWLNGKEYKCKVSNKALPSSIEKTISKAKGQPREPQVYTLPPSREEMTKNQVSLTCLVKGFYPSDIAVEWESNGQPENNYKTTPPVLDSDGSFFLYSKLTVDKSRWQQGNVFSCSVMHEALHNHYTQKSLSLSPG

SEQ ID NO: 50 - protein, 446 aa, Artificial Sequence
  Synthetic: Ab CD73.4-IgG2-C219S full-length HC
QVQLVESGGGVVQPGRSLRLSCAASGFTFSNYGMHWVRQAPGKGLEWVAVILYDGSNKYYPDSVKGRFTISRDNSKNTLYLQMNSLRAEDTAVYYCARGGSSWYPDSFDIWGQGTMVTVSSASTKGPSVFPLAPCSRSTSESTAALGCLVKDYFPEPVTVSWNSGALTSGVHTFPAVLQSSGLYSLSSVVTVPSSNFGTQTYTCNVDHKPSNTKVDKTVERKSCVECPPCPAPPVAGPSVFLFPPKPKDTLMISRTPEVTCVVVDVSHEDPEVQFNWYVDGVEVHNAKTKPREEQFNSTFRVVSVLTVVHQDWLNGKEYKCKVSNKGLPAPIEKTISKTKGQPREPQVYTLPPSREEMTKNQVSLTCLVKGFYPSDIAVEWESNGQPENNYKTTPPMLDSDGSFFLYSKLTVDKSRWQQGNVFSCSVMHEALHNHYTQKSLSLSPG

SEQ ID NO: 51 - protein, 449 aa, Artificial Sequence
  Synthetic: Ab CD73.3-IgG1.1 full-length HC  (IgG1.1 IgG1.1(L234A/L235E/G237A)-IgG1.1(A330S/P331S)-IgG1.1)
EVQLVESGGGLVQPGRSLRLSCAASGFTFDDYAMHWVRQAPGKGLEWVSGISWKSGSIGYADSVKGRFTISRDNAKNSLYLQMNSLRAEDTVLYYCVKGYYVILTGLDYWGQGTLVTVSSASTKGPSVFPLAPSSKSTSGGTAALGCLVKDYFPEPVTVSWNSGALTSGVHTFPAVLQSSGLYSLSSVVTVPSSSLGTQTYICNVNHKPSNTKVDKKVEPKSCDKTHTCPPCPAPEAEGAPSVFLFPPKPKDTLMISRTPEVTCVVVDVSHEDPEVKFNWYVDGVEVHNAKTKPREEQYNSTYRVVSVLTVLHQDWLNGKEYKCKVSNKALPSSIEKTISKAKGQPREPQVYTLPPSREEMTKNQVSLTCLVKGFYPSDIAVEWESNGQPENNYKTTPPVLDSDGSFFLYSKLTVDKSRWQQGNVFSCSVMHEALHNHYTQKSLSLSPG

SEQ ID NO: 52 - protein, 326 aa, Artificial Sequence; identical to SEQ ID NO: 6
  Synthetic: Full-length heavy chain constant region IgG2-IgG2-IgG2-IgG2

SEQ ID NO: 53 - protein, 330 aa, Artificial Sequence; identical to SEQ ID NO: 1
  Synthetic: Full-length heavy chain constant region IgG1-IgG1-IgG1-IgG1

SEQ ID NO: 54 - protein, 329 aa, Artificial Sequence
  Synthetic: Full-length heavy chain constant region IgG1-IgG1.1(L234A/L235E/G237A)-IgG1.1 (A330S/P331S)-IgG1
ASTKGPSVFPLAPSSKSTSGGTAALGCLVKDYFPEPVTVSWNSGALTSGVHTFPAVLQSSGLYSLSSVVTVPSSSLGTQTYICNVNHKPSNTKVDKKVEPKSCDKTHTCPPCPAPEAEGAPSVFLFPPKPKDTLMISRTPEVTCVVVDVSHEDPEVKFNWYVDGVEVHNAKTKPREEQYNSTYRVVSVLTVLHQDWLNGKEYKCKVSNKALPSSIEKTISKAKGQPREPQVYTLPPSREEMTKNQVSLTCLVKGFYPSDIAVEWESNGQPENNYKTTPPVLDSDGSFFLYSKLTVDKSRWQQGNVFSCSVMHEALHNHYTQKSLSLSPG

SEQ ID NO: 55 - protein, 326 aa, Artificial Sequence; identical to SEQ ID NO: 28
  Synthetic: Full-length heavy chain constant region IgG2-IgG2/IgG1 hybrid-IgG1-IgG1

SEQ ID NO: 56 - protein, 325 aa, Artificial Sequence
  Synthetic: Full-length heavy chain constant region IgG2-IgG2-IgG1.1(A330/P331S)-IgG1
ASTKGPSVFPLAPCSRSTSESTAALGCLVKDYFPEPVTVSWNSGALTSGVHTFPAVLQSSGLYSLSSVVTVPSSNFGTQTYTCNVDHKPSNTKVDKTVERKCCVECPPCPAPPVAGPSVFLFPPKPKDTLMISRTPEVTCVVVDVSHEDPEVKFNWYVDGVEVHNAKTKPREEQYNSTYRVVSVLTVLHQDWLNGKEYKCKVSNKALPSSIEKTISKAKGQPREPQVYTLPPSREEMTKNQVSLTCLVKGFYPSDIAVEWESNGQPENNYKTTPPVLDSDGSFFLYSKLTVDKSRWQQGNVFSCSVMHEALHNHYTQKSLSLSPG

SEQ ID NO: 57 - protein, 5 aa, Artificial Sequence
  Synthetic: Table 2  hinge domain
VDKRV

SEQ ID NO: 58 - protein, 5 aa, Artificial Sequence
  Synthetic: Table 2  hinge domain
VDKTV

SEQ ID NO: 59 - protein, 10 aa, Artificial Sequence
  Synthetic: Table 2  hinge domain
EPKSCDKTHT

SEQ ID NO: 60 - protein, 3 aa, Artificial Sequence
  Synthetic: Table 2  hinge domain
ERK

SEQ ID NO: 61 - protein, 12 aa, Artificial Sequence
  Synthetic: Table 2  hinge domain
ELKTPLGDTTHT

SEQ ID NO: 62 - protein, 4 aa, Artificial Sequence
  Synthetic: Table 2  hinge domain
EPKS

SEQ ID NO: 63 - protein, 7 aa, Artificial Sequence
  Synthetic: Table 2  hinge domain
ESKYGPP

SEQ ID NO: 64 - protein, 5 aa, Artificial Sequence
  Synthetic: Table 2  hinge domain
CPPCP

SEQ ID NO: 65 - protein, 9 aa, Artificial Sequence
  Synthetic: Table 2  hinge domain
CCVECPPCP

SEQ ID NO: 66 - protein, 5 aa, Artificial Sequence
  Synthetic: Table 2  hinge domain
CPRCP

SEQ ID NO: 67 - protein, 15 aa, Artificial Sequence
  Synthetic: Table 2  hinge domain
EPKSCDTPPPCPRCP

SEQ ID NO: 68 - protein, 11 aa, Artificial Sequence
  Synthetic: Table 2  hinge domain
CDTPPPCPRCP

SEQ ID NO: 69 - protein, 5 aa, Artificial Sequence
  Synthetic: Table 2  hinge domain
CPSCP

SEQ ID NO: 70 - protein, 7 aa, Artificial Sequence
  Synthetic: Table 2  hinge domain
APELLGG

SEQ ID NO: 71 - protein, 6 aa, Artificial Sequence
  Synthetic: Table 2  hinge domain
APPVAG

SEQ ID NO: 72 - protein, 214 aa, Artificial Sequence
  Synthetic: Light chain 11F11
DIQMTQSPSSLSASVGDRVTITCRASQGISSWLAWYQQKPEKAPKSLIYAASSLQSGVPSRFSGSGSGTDFTLTISSLQPEDFATYYCQQYNSYPLTFGGGTKVEIKRTVAAPSVFIFPPSDEQLKSGTASVVCLLNNFYPREAKVQWKVDNALQSGNSQESVTEQDSKDSTYSLSSTLTLSKADYEKHKVYACEVTHQGLSSPVTKSFNRGEC

SEQ ID NO: 73 - protein, 214 aa, Artificial Sequence
  Synthetic: Light chain 4C3
EIVLTQSPGTLSLSPGERATLSCRASQSVSSYLAWYQQKPGQAPRLLIYGASSRATGIPDRFSGSGSGTDFTLTISRLEPEDFAVYYCQQYGSSPLTFGGGTKVEIKRTVAAPSVFIFPPSDEQLKSGTASVVCLLNNFYPREAKVQWKVDNALQSGNSQESVTEQDSKDSTYSLSSTLTLSKADYEKHKVYACEVTHQGLSSPVTKSFNRGEC

SEQ ID NO: 74 - protein, 214 aa, Artificial Sequence
  Synthetic: Light chain 6D11
EIVLTQSPGTLSLSPGERATLSCRASQSVSSSYLAWYQQKPGQAPRLLIYGASSRATGIPDRFSGSGSGTDFTLTISRLEPEDFAVYYCQHYGSSFTFGPGTKVDIKRTVAAPSVFIFPPSDEQLKSGTASVVCLLNNFYPREAKVQWKVDNALQSGNSQESVTEQDSKDSTYSLSSTLTLSKADYEKHKVYACEVTHQGLSSPVTKSFNRGEC

SEQ ID NO: 75 - protein, 124 aa, Artificial Sequence
  Synthetic: Anti-GITR AbVH
QVQLVESGGGVVQPGRSLRLSCAASGFTFSSYGMHWVRQAPGKGLEWVAVIWYEGSNKYYADSVKGRFTISRDNSKNTLYLQMNSLRAEDTAVYYCARGGSMVRGDYYYGMDVWGQGTTVTVSS

SEQ ID NO: 76 - protein, 107 aa, Artificial Sequence
  Synthetic: Anti-GITR Ab VL
AIQLTQSPSSLSASVGDRVTITCRASQGISSALAWYQQKPGKAPKLLIYDASSLESGVPSRFSGSGSGTDFTLTISSLQPEDFATYYCQQFNSYPYTFGQGTKLEIK

SEQ ID NO: 77 - protein, 214 aa, Artificial Sequence
  Synthetic: Anti-GITR Ab LC
AIQLTQSPSSLSASVGDRVTITCRASQGISSALAWYQQKPGKAPKLLIYDASSLESGVPSRFSGSGSGTDFTLTISSLQPEDFATYYCQQFNSYPYTFGQGTKLEIKRTVAAPSVFIFPPSDEQLKSGTASVVCLLNNFYPREAKVQWKVDNALQSGNSQESVTEQDSKDSTYSLSSTLTLSKADYEKHKVYACEVTHQGLSSPVTKSFNRGEC

SEQ ID NO: 78 - protein, 330 aa, Artificial Sequence
  Synthetic: IgG1f
ASTKGPSVFPLAPSSKSTSGGTAALGCLVKDYFPEPVTVSWNSGALTSGVHTFPAVLQSSGLYSLSSVVTVPSSSLGTQTYICNVNHKPSNTKVDKRVEPKSCDKTHTCPPCPAPELLGGPSVFLFPPKPKDTLMISRTPEVTCVVVDVSHEDPEVKFNWYVDGVEVHNAKTKPREEQYNSTYRVVSVLTVLHQDWLNGKEYKCKVSNKALPAPIEKTISKAKGQPREPQVYTLPPSREEMTKNQVSLTCLVKGFYPSDIAVEWESNGQPENNYKTTPPVLDSDGSFFLYSKLTVDKSRWQQGNVFSCSVMHEALHNHYTQKSLSLSPGK

SEQ ID NO: 79 - protein, 326 aa, Artificial Sequence
  Synthetic: IgG2.3
ASTKGPSVFPLAPCSRSTSESTAALGCLVKDYFPEPVTVSWNSGALTSGVHTFPAVLQSSGLYSLSSVVTVPSSNFGTQTYTCNVDHKPSNTKVDKTVERKSCVECPPCPAPPVAGPSVFLFPPKPKDTLMISRTPEVTCVVVDVSHEDPEVQFNWYVDGVEVHNAKTKPREEQFNSTFRVVSVLTVVHQDWLNGKEYKCKVSNKGLPAPIEKTISKTKGQPREPQVYTLPPSREEMTKNQVSLTCLVKGFYPSDIAVEWESNGQPENNYKTTPPMLDSDGSFFLYSKLTVDKSRWQQGNVFSCSVMHEALHNHYTQKSLSLSPGK

SEQ ID NO: 80 - protein, 327 aa, Artificial Sequence
  Synthetic: IgG2.3G1-AY
ASTKGPSVFPLAPCSRSTSESTAALGCLVKDYFPEPVTVSWNSGALTSGVHTFPAVLQSSGLYSLSSVVTVPSSNFGTQTYTCNVDHKPSNTKVDKTVERKSCVECPPCPAPELLGGPSVFLFPPKPKDTLMISRTPEVTCVVVDVSHEDPEVKFNWYVDGVEVHNAKTKPREEQYNSTYRVVSVLTVLHQDWLNGKEYKCKVSNKALPAPIEKTISKAKGQPREPQVYTLPPSREEMTKNQVSLTCLVKGFYPSDIAVEWESNGQPENNYKTTPPVLDSDGSFFLYSKLTVDKSRWQQGNVFSCSVMHEALHNHYTQKSLSLSPGK

SEQ ID NO: 81 - protein, 326 aa, Artificial Sequence
  Synthetic: IgG2.3G1-KH
ASTKGPSVFPLAPCSRSTSESTAALGCLVKDYFPEPVTVSWNSGALTSGVHTFPAVLQSSGLYSLSSVVTVPSSNFGTQTYTCNVDHKPSNTKVDKTVERKSCVECPPCPAPPVAGPSVFLFPPKPKDTLMISRTPEVTCVVVDVSHEDPEVKFNWYVDGVEVHNAKTKPREEQYNSTYRVVSVLTVLHQDWLNGKEYKCKVSNKALPAPIEKTISKAKGQPREPQVYTLPPSREEMTKNQVSLTCLVKGFYPSDIAVEWESNGQPENNYKTTPPVLDSDGSFFLYSKLTVDKSRWQQGNVFSCSVMHEALHNHYTQKSLSLSPGK

SEQ ID NO: 82 - protein, 326 aa, Artificial Sequence
  Synthetic: IgG2.5
ASTKGPSVFPLAPSSRSTSESTAALGCLVKDYFPEPVTVSWNSGALTSGVHTFPAVLQSSGLYSLSSVVTVPSSNFGTQTYTCNVDHKPSNTKVDKTVERKCCVECPPCPAPPVAGPSVFLFPPKPKDTLMISRTPEVTCVVVDVSHEDPEVQFNWYVDGVEVHNAKTKPREEQFNSTFRVVSVLTVVHQDWLNGKEYKCKVSNKGLPAPIEKTISKTKGQPREPQVYTLPPSREEMTKNQVSLTCLVKGFYPSDIAVEWESNGQPENNYKTTPPMLDSDGSFFLYSKLTVDKSRWQQGNVFSCSVMHEALHNHYTQKSLSLSPGK

SEQ ID NO: 83 - protein, 330 aa, Artificial Sequence
  Synthetic: IgG1.1f
ASTKGPSVFPLAPSSKSTSGGTAALGCLVKDYFPEPVTVSWNSGALTSGVHTFPAVLQSSGLYSLSSVVTVPSSSLGTQTYICNVNHKPSNTKVDKRVEPKSCDKTHTCPPCPAPEAEGAPSVFLFPPKPKDTLMISRTPEVTCVVVDVSHEDPEVKFNWYVDGVEVHNAKTKPREEQYNSTYRVVSVLTVLHQDWLNGKEYKCKVSNKALPSSIEKTISKAKGQPREPQVYTLPPSREEMTKNQVSLTCLVKGFYPSDIAVEWESNGQPENNYKTTPPVLDSDGSFFLYSKLTVDKSRWQQGNVFSCSVMHEALHNHYTQKSLSLSPGK

SEQ ID NO: 84 - protein, 326 aa, Artificial Sequence
  Synthetic: IgG2.3G1.1f-KH
ASTKGPSVFPLAPCSRSTSESTAALGCLVKDYFPEPVTVSWNSGALTSGVHTFPAVLQSSGLYSLSSVVTVPSSNFGTQTYTCNVDHKPSNTKVDKTVERKSCVECPPCPAPPVAGPSVFLFPPKPKDTLMISRTPEVTCVVVDVSHEDPEVKFNWYVDGVEVHNAKTKPREEQYNSTYRVVSVLTVLHQDWLNGKEYKCKVSNKALPSSIEKTISKAKGQPREPQVYTLPPSREEMTKNQVSLTCLVKGFYPSDIAVEWESNGQPENNYKTTPPVLDSDGSFFLYSKLTVDKSRWQQGNVFSCSVMHEALHNHYTQKSLSLSPGK

SEQ ID NO: 85 - protein, 327 aa, Artificial Sequence
  Synthetic: IgG1-deltaTHT
ASTKGPSVFPLAPSSKSTSGGTAALGCLVKDYFPEPVTVSWNSGALTSGVHTFPAVLQSSGLYSLSSVVTVPSSSLGTQTYICNVNHKPSNTKVDKRVEPKSCDKCPPCPAPELLGGPSVFLFPPKPKDTLMISRTPEVTCVVVDVSHEDPEVKFNWYVDGVEVHNAKTKPREEQYNSTYRVVSVLTVLHQDWLNGKEYKCKVSNKALPAPIEKTISKAKGQPREPQVYTLPPSREEMTKNQVSLTCLVKGFYPSDIAVEWESNGQPENNYKTTPPVLDSDGSFFLYSKLTVDKSRWQQGNVFSCSVMHEALHNHYTQKSLSLSPGK

SEQ ID NO: 86 - protein, 329 aa, Artificial Sequence
  Synthetic: IgG2.3-plusTHT
ASTKGPSVFPLAPCSRSTSESTAALGCLVKDYFPEPVTVSWNSGALTSGVHTFPAVLQSSGLYSLSSVVTVPSSNFGTQTYTCNVDHKPSNTKVDKTVERKSCVETHTCPPCPAPPVAGPSVFLFPPKPKDTLMISRTPEVTCVVVDVSHEDPEVQFNWYVDGVEVHNAKTKPREEQFNSTFRVVSVLTVVHQDWLNGKEYKCKVSNKGLPAPIEKTISKTKGQPREPQVYTLPPSREEMTKNQVSLTCLVKGFYPSDIAVEWESNGQPENNYKTTPPMLDSDGSFFLYSKLTVDKSRWQQGNVFSCSVMHEALHNHYTQKSLSLSPGK

SEQ ID NO: 87 - protein, 329 aa, Artificial Sequence
  Synthetic: IgG2.3-plusGGG
ASTKGPSVFPLAPCSRSTSESTAALGCLVKDYFPEPVTVSWNSGALTSGVHTFPAVLQSSGLYSLSSVVTVPSSNFGTQTYTCNVDHKPSNTKVDKTVERKSCVEGGGCPPCPAPPVAGPSVFLFPPKPKDTLMISRTPEVTCVVVDVSHEDPEVQFNWYVDGVEVHNAKTKPREEQFNSTFRVVSVLTVVHQDWLNGKEYKCKVSNKGLPAPIEKTISKTKGQPREPQVYTLPPSREEMTKNQVSLTCLVKGFYPSDIAVEWESNGQPENNYKTTPPMLDSDGSFFLYSKLTVDKSRWQQGNVFSCSVMHEALHNHYTQKSLSLSPGK

SEQ ID NO: 88 - protein, 326 aa, Artificial Sequence
  Synthetic: IgG2.5G1.1f-KH
ASTKGPSVFPLAPSSRSTSESTAALGCLVKDYFPEPVTVSWNSGALTSGVHTFPAVLQSSGLYSLSSVVTVPSSNFGTQTYTCNVDHKPSNTKVDKTVERKCCVECPPCPAPPVAGPSVFLFPPKPKDTLMISRTPEVTCVVVDVSHEDPEVKFNWYVDGVEVHNAKTKPREEQYNSTYRVVSVLTVLHQDWLNGKEYKCKVSNKALPSSIEKTISKAKGQPREPQVYTLPPSREEMTKNQVSLTCLVKGFYPSDIAVEWESNGQPENNYKTTPPVLDSDGSFFLYSKLTVDKSRWQQGNVFSCSVMHEALHNHYTQKSLSLSPGK

SEQ ID NO: 89 - protein, 327 aa, Artificial Sequence
  Synthetic: IgG2.5G1-AY
ASTKGPSVFPLAPSSRSTSESTAALGCLVKDYFPEPVTVSWNSGALTSGVHTFPAVLQSSGLYSLSSVVTVPSSNFGTQTYTCNVDHKPSNTKVDKTVERKCCVECPPCPAPELLGGPSVFLFPPKPKDTLMISRTPEVTCVVVDVSHEDPEVKFNWYVDGVEVHNAKTKPREEQYNSTYRVVSVLTVLHQDWLNGKEYKCKVSNKALPAPIEKTISKAKGQPREPQVYTLPPSREEMTKNQVSLTCLVKGFYPSDIAVEWESNGQPENNYKTTPPVLDSDGSFFLYSKLTVDKSRWQQGNVFSCSVMHEALHNHYTQKSLSLSPGK

SEQ ID NO: 90 - protein, 326 aa, Artificial Sequence
  Synthetic: IgG2.5G1-KH
ASTKGPSVFPLAPSSRSTSESTAALGCLVKDYFPEPVTVSWNSGALTSGVHTFPAVLQSSGLYSLSSVVTVPSSNFGTQTYTCNVDHKPSNTKVDKTVERKCCVECPPCPAPPVAGPSVFLFPPKPKDTLMISRTPEVTCVVVDVSHEDPEVKFNWYVDGVEVHNAKTKPREEQYNSTYRVVSVLTVLHQDWLNGKEYKCKVSNKALPAPIEKTISKAKGQPREPQVYTLPPSREEMTKNQVSLTCLVKGFYPSDIAVEWESNGQPENNYKTTPPVLDSDGSFFLYSKLTVDKSRWQQGNVFSCSVMHEALHNHYTQKSLSLSPGK

SEQ ID NO: 91 - protein, 329 aa, Artificial Sequence
  Synthetic: IgG2.5-plusTHT
ASTKGPSVFPLAPSSRSTSESTAALGCLVKDYFPEPVTVSWNSGALTSGVHTFPAVLQSSGLYSLSSVVTVPSSNFGTQTYTCNVDHKPSNTKVDKTVERKCCVETHTCPPCPAPPVAGPSVFLFPPKPKDTLMISRTPEVTCVVVDVSHEDPEVQFNWYVDGVEVHNAKTKPREEQFNSTFRVVSVLTVVHQDWLNGKEYKCKVSNKGLPAPIEKTISKTKGQPREPQVYTLPPSREEMTKNQVSLTCLVKGFYPSDIAVEWESNGQPENNYKTTPPMLDSDGSFFLYSKLTVDKSRWQQGNVFSCSVMHEALHNHYTQKSLSLSPGK

SEQ ID NO: 92 - protein, 327 aa, Artificial Sequence
  Synthetic: IgG1-G2.3G1-AY
ASTKGPSVFPLAPSSKSTSGGTAALGCLVKDYFPEPVTVSWNSGALTSGVHTFPAVLQSSGLYSLSSVVTVPSSSLGTQTYICNVNHKPSNTKVDKRVERKSCVECPPCPAPELLGGPSVFLFPPKPKDTLMISRTPEVTCVVVDVSHEDPEVKFNWYVDGVEVHNAKTKPREEQYNSTYRVVSVLTVLHQDWLNGKEYKCKVSNKALPAPIEKTISKAKGQPREPQVYTLPPSREEMTKNQVSLTCLVKGFYPSDIAVEWESNGQPENNYKTTPPVLDSDGSFFLYSKLTVDKSRWQQGNVFSCSVMHEALHNHYTQKSLSLSPGK

SEQ ID NO: 93 - protein, 326 aa, Artificial Sequence
  Synthetic: IgG1-G2.3G1-KH
ASTKGPSVFPLAPSSKSTSGGTAALGCLVKDYFPEPVTVSWNSGALTSGVHTFPAVLQSSGLYSLSSVVTVPSSSLGTQTYICNVNHKPSNTKVDKRVERKSCVECPPCPAPPVAGPSVFLFPPKPKDTLMISRTPEVTCVVVDVSHEDPEVKFNWYVDGVEVHNAKTKPREEQYNSTYRVVSVLTVLHQDWLNGKEYKCKVSNKALPAPIEKTISKAKGQPREPQVYTLPPSREEMTKNQVSLTCLVKGFYPSDIAVEWESNGQPENNYKTTPPVLDSDGSFFLYSKLTVDKSRWQQGNVFSCSVMHEALHNHYTQKSLSLSPGK

SEQ ID NO: 94 - protein, 330 aa, Artificial Sequence
  Synthetic: G2-G1-G1-G1
ASTKGPSVFPLAPCSRSTSESTAALGCLVKDYFPEPVTVSWNSGALTSGVHTFPAVLQSSGLYSLSSVVTVPSSNFGTQTYTCNVDHKPSNTKVDKTVERKSCDKTHTCPPCPAPELLGGPSVFLFPPKPKDTLMISRTPEVTCVVVDVSHEDPEVKFNWYVDGVEVHNAKTKPREEQYNSTYRVVSVLTVLHQDWLNGKEYKCKVSNKALPAPIEKTISKAKGQPREPQVYTLPPSREEMTKNQVSLTCLVKGFYPSDIAVEWESNGQPENNYKTTPPVLDSDGSFFLYSKLTVDKSRWQQGNVFSCSVMHEALHNHYTQKSLSLSPGK

SEQ ID NO: 95 - protein, 330 aa, Artificial Sequence
  Synthetic: G2.5-G1-G1-G1
ASTKGPSVFPLAPSSRSTSESTAALGCLVKDYFPEPVTVSWNSGALTSGVHTFPAVLQSSGLYSLSSVVTVPSSNFGTQTYTCNVDHKPSNTKVDKTVERKSCDKTHTCPPCPAPELLGGPSVFLFPPKPKDTLMISRTPEVTCVVVDVSHEDPEVKFNWYVDGVEVHNAKTKPREEQYNSTYRVVSVLTVLHQDWLNGKEYKCKVSNKALPAPIEKTISKAKGQPREPQVYTLPPSREEMTKNQVSLTCLVKGFYPSDIAVEWESNGQPENNYKTTPPVLDSDGSFFLYSKLTVDKSRWQQGNVFSCSVMHEALHNHYTQKSLSLSPGK

SEQ ID NO: 96 - protein, 326 aa, Artificial Sequence
  Synthetic: G1-G2.3-G2-G2
ASTKGPSVFPLAPSSKSTSGGTAALGCLVKDYFPEPVTVSWNSGALTSGVHTFPAVLQSSGLYSLSSVVTVPSSSLGTQTYICNVNHKPSNTKVDKRVEPKSCVECPPCPAPPVAGPSVFLFPPKPKDTLMISRTPEVTCVVVDVSHEDPEVQFNWYVDGVEVHNAKTKPREEQFNSTFRVVSVLTVVHQDWLNGKEYKCKVSNKGLPAPIEKTISKTKGQPREPQVYTLPPSREEMTKNQVSLTCLVKGFYPSDIAVEWESNGQPENNYKTTPPMLDSDGSFFLYSKLTVDKSRWQQGNVFSCSVMHEALHNHYTQKSLSLSPGK

SEQ ID NO: 97 - protein, 330 aa, Artificial Sequence
  Synthetic: G1-KRGEGSSNLF
ASTKGPSVFPLAPSSRSTSESTAALGCLVKDYFPEPVTVSWNSGALTSGVHTFPAVLQSSGLYSLSSVVTVPSSNFGTQTYICNVNHKPSNTKVDKRVEPKSCDKTHTCPPCPAPELLGGPSVFLFPPKPKDTLMISRTPEVTCVVVDVSHEDPEVKFNWYVDGVEVHNAKTKPREEQYNSTYRVVSVLTVLHQDWLNGKEYKCKVSNKALPAPIEKTISKAKGQPREPQVYTLPPSREEMTKNQVSLTCLVKGFYPSDIAVEWESNGQPENNYKTTPPVLDSDGSFFLYSKLTVDKSRWQQGNVFSCSVMHEALHNHYTQKSLSLSPGK

SEQ ID NO: 98 - protein, 330 aa, Artificial Sequence
  Synthetic: G1-KRGEGS
ASTKGPSVFPLAPSSRSTSESTAALGCLVKDYFPEPVTVSWNSGALTSGVHTFPAVLQSSGLYSLSSVVTVPSSSLGTQTYICNVNHKPSNTKVDKRVEPKSCDKTHTCPPCPAPELLGGPSVFLFPPKPKDTLMISRTPEVTCVVVDVSHEDPEVKFNWYVDGVEVHNAKTKPREEQYNSTYRVVSVLTVLHQDWLNGKEYKCKVSNKALPAPIEKTISKAKGQPREPQVYTLPPSREEMTKNQVSLTCLVKGFYPSDIAVEWESNGQPENNYKTTPPVLDSDGSFFLYSKLTVDKSRWQQGNVFSCSVMHEALHNHYTQKSLSLSPGK

SEQ ID NO: 99 - protein, 330 aa, Artificial Sequence
  Synthetic: G1-SNLF
ASTKGPSVFPLAPSSKSTSGGTAALGCLVKDYFPEPVTVSWNSGALTSGVHTFPAVLQSSGLYSLSSVVTVPSSNFGTQTYICNVNHKPSNTKVDKRVEPKSCDKTHTCPPCPAPELLGGPSVFLFPPKPKDTLMISRTPEVTCVVVDVSHEDPEVKFNWYVDGVEVHNAKTKPREEQYNSTYRVVSVLTVLHQDWLNGKEYKCKVSNKALPAPIEKTISKAKGQPREPQVYTLPPSREEMTKNQVSLTCLVKGFYPSDIAVEWESNGQPENNYKTTPPVLDSDGSFFLYSKLTVDKSRWQQGNVFSCSVMHEALHNHYTQKSLSLSPGK

SEQ ID NO: 100 - protein, 330 aa, Artificial Sequence
  Synthetic: IgG1-ITNDRTPR
ASTKGPSVFPLAPSSKSTSGGTAALGCLVKDYFPEPVTVSWNSGALTSGVHTFPAVLQSSGLYSLSSVVTVPSSSLGTQTYTCNVDHKPSNTKVDKTVERKSCDKTHTCPPCPAPELLGGPSVFLFPPKPKDTLMISRTPEVTCVVVDVSHEDPEVKFNWYVDGVEVHNAKTKPREEQYNSTYRVVSVLTVLHQDWLNGKEYKCKVSNKALPAPIEKTISKAKGQPREPQVYTLPPSREEMTKNQVSLTCLVKGFYPSDIAVEWESNGQPENNYKTTPPVLDSDGSFFLYSKLTVDKSRWQQGNVFSCSVMHEALHNHYTQKSLSLSPGK

SEQ ID NO: 101 - protein, 329 aa, Artificial Sequence
  Synthetic: G1-SNLFPR
ASTKGPSVFPLAPSSKSTSGGTAALGCLVKDYFPEPVTVSWNSGALTSGVHTFPAVLQSSGLYSLSSVVTVPSSNFGTQTYICNVNHKPSNTKVDKRVERKSCDKTHTCPPCPAPELLGGPSVFLFPPKPKDTLMISRTPEVTCVVVDVSHEDPEVKFNWYVDGVEVHNAKTKPREEQYNSTYRVVSVLTVLHQDWLNGKEYKCKVSNKALPAPIEKTISKAKGQPREPQVYTLPPSREEMTKNQVSLTCLVKGFYPSDIAVEWESNGQPENNYKTTPPVLDSDGSFFLYSKLTVDKSRWQQGNVFSCSVMHEALHNHYTQKSLSLSPG

SEQ ID NO: 102 - protein, 326 aa, Artificial Sequence
  Synthetic: G2-RKEGSGNSFL
ASTKGPSVFPLAPCSKSTSGGTAALGCLVKDYFPEPVTVSWNSGALTSGVHTFPAVLQSSGLYSLSSVVTVPSSSLGTQTYTCNVDHKPSNTKVDKTVERKSCVECPPCPAPPVAGPSVFLFPPKPKDTLMISRTPEVTCVVVDVSHEDPEVQFNWYVDGVEVHNAKTKPREEQFNSTFRVVSVLTVVHQDWLNGKEYKCKVSNKGLPAPIEKTISKTKGQPREPQVYTLPPSREEMTKNQVSLTCLVKGFYPSDIAVEWESNGQPENNYKTTPPMLDSDGSFFLYSKLTVDKSRWQQGNVFSCSVMHEALHNHYTQKSLSLSPGK

SEQ ID NO: 103 - protein, 326 aa, Artificial Sequence
  Synthetic: G2-RKEGSG
ASTKGPSVFPLAPCSKSTSGGTAALGCLVKDYFPEPVTVSWNSGALTSGVHTFPAVLQSSGLYSLSSVVTVPSSNFGTQTYTCNVDHKPSNTKVDKTVERKSCVECPPCPAPPVAGPSVFLFPPKPKDTLMISRTPEVTCVVVDVSHEDPEVQFNWYVDGVEVHNAKTKPREEQFNSTFRVVSVLTVVHQDWLNGKEYKCKVSNKGLPAPIEKTISKTKGQPREPQVYTLPPSREEMTKNQVSLTCLVKGFYPSDIAVEWESNGQPENNYKTTPPMLDSDGSFFLYSKLTVDKSRWQQGNVFSCSVMHEALHNHYTQKSLSLSPGK

SEQ ID NO: 104 - protein, 326 aa, Artificial Sequence
  Synthetic: G2-NSFL
ASTKGPSVFPLAPCSRSTSESTAALGCLVKDYFPEPVTVSWNSGALTSGVHTFPAVLQSSGLYSLSSVVTVPSSSLGTQTYTCNVDHKPSNTKVDKTVERKSCVECPPCPAPPVAGPSVFLFPPKPKDTLMISRTPEVTCVVVDVSHEDPEVQFNWYVDGVEVHNAKTKPREEQFNSTFRVVSVLTVVHQDWLNGKEYKCKVSNKGLPAPIEKTISKTKGQPREPQVYTLPPSREEMTKNQVSLTCLVKGFYPSDIAVEWESNGQPENNYKTTPPMLDSDGSFFLYSKLTVDKSRWQQGNVFSCSVMHEALHNHYTQKSLSLSPGK

SEQ ID NO: 105 - protein, 326 aa, Artificial Sequence
  Synthetic: IgG2-TIDNTRRP
ASTKGPSVFPLAPCSRSTSESTAALGCLVKDYFPEPVTVSWNSGALTSGVHTFPAVLQSSGLYSLSSVVTVPSSNFGTQTYICNVNHKPSNTKVDKRVEPKSCVECPPCPAPPVAGPSVFLFPPKPKDTLMISRTPEVTCVVVDVSHEDPEVQFNWYVDGVEVHNAKTKPREEQFNSTFRVVSVLTVVHQDWLNGKEYKCKVSNKGLPAPIEKTISKTKGQPREPQVYTLPPSREEMTKNQVSLTCLVKGFYPSDIAVEWESNGQPENNYKTTPPMLDSDGSFFLYSKLTVDKSRWQQGNVFSCSVMHEALHNHYTQKSLSLSPGK

SEQ ID NO: 106 - protein, 326 aa, Artificial Sequence
  Synthetic: G2-NSFLRP
ASTKGPSVFPLAPCSRSTSESTAALGCLVKDYFPEPVTVSWNSGALTSGVHTFPAVLQSSGLYSLSSVVTVPSSSLGTQTYTCNVDHKPSNTKVDKTVEPKSCVECPPCPAPPVAGPSVFLFPPKPKDTLMISRTPEVTCVVVDVSHEDPEVQFNWYVDGVEVHNAKTKPREEQFNSTFRVVSVLTVVHQDWLNGKEYKCKVSNKGLPAPIEKTISKTKGQPREPQVYTLPPSREEMTKNQVSLTCLVKGFYPSDIAVEWESNGQPENNYKTTPPMLDSDGSFFLYSKLTVDKSRWQQGNVFSCSVMHEALHNHYTQKSLSLSPGK

SEQ ID NO: 107 - protein, 330 aa, Artificial Sequence
  Synthetic: G1-G1-G2-G1-AY
ASTKGPSVFPLAPSSKSTSGGTAALGCLVKDYFPEPVTVSWNSGALTSGVHTFPAVLQSSGLYSLSSVVTVPSSSLGTQTYICNVNHKPSNTKVDKRVEPKSCDKTHTCPPCPAPELLGGPSVFLFPPKPKDTLMISRTPEVTCVVVDVSHEDPEVQFNWYVDGVEVHNAKTKPREEQFNSTFRVVSVLTVVHQDWLNGKEYKCKVSNKGLPAPIEKTISKTKGQPREPQVYTLPPSREEMTKNQVSLTCLVKGFYPSDIAVEWESNGQPENNYKTTPPVLDSDGSFFLYSKLTVDKSRWQQGNVFSCSVMHEALHNHYTQKSLSLSPGK

SEQ ID NO: 108 - protein, 329 aa, Artificial Sequence
  Synthetic: G1-G1-G2-G1-KH
ASTKGPSVFPLAPSSKSTSGGTAALGCLVKDYFPEPVTVSWNSGALTSGVHTFPAVLQSSGLYSLSSVVTVPSSSLGTQTYICNVNHKPSNTKVDKRVEPKSCDKTHTCPPCPAPPVAGPSVFLFPPKPKDTLMISRTPEVTCVVVDVSHEDPEVQFNWYVDGVEVHNAKTKPREEQFNSTFRVVSVLTVVHQDWLNGKEYKCKVSNKGLPAPIEKTISKTKGQPREPQVYTLPPSREEMTKNQVSLTCLVKGFYPSDIAVEWESNGQPENNYKTTPPVLDSDGSFFLYSKLTVDKSRWQQGNVFSCSVMHEALHNHYTQKSLSLSPGK

SEQ ID NO: 109 - protein, 326 aa, Artificial Sequence
  Synthetic: G2-G2.3-G1-G2-KH
ASTKGPSVFPLAPCSRSTSESTAALGCLVKDYFPEPVTVSWNSGALTSGVHTFPAVLQSSGLYSLSSVVTVPSSNFGTQTYTCNVDHKPSNTKVDKTVERKSCVECPPCPAPPVAGPSVFLFPPKPKDTLMISRTPEVTCVVVDVSHEDPEVKFNWYVDGVEVHNAKTKPREEQYNSTYRVVSVLTVLHQDWLNGKEYKCKVSNKALPAPIEKTISKAKGQPREPQVYTLPPSREEMTKNQVSLTCLVKGFYPSDIAVEWESNGQPENNYKTTPPMLDSDGSFFLYSKLTVDKSRWQQGNVFSCSVMHEALHNHYTQKSLSLSPGK

SEQ ID NO: 110 - protein, 326 aa, Artificial Sequence
  Synthetic: G2.5-G2.3-G1-G2-KH
ASTKGPSVFPLAPSSRSTSESTAALGCLVKDYFPEPVTVSWNSGALTSGVHTFPAVLQSSGLYSLSSVVTVPSSNFGTQTYTCNVDHKPSNTKVDKTVERKSCVECPPCPAPPVAGPSVFLFPPKPKDTLMISRTPEVTCVVVDVSHEDPEVKFNWYVDGVEVHNAKTKPREEQYNSTYRVVSVLTVLHQDWLNGKEYKCKVSNKALPAPIEKTISKAKGQPREPQVYTLPPSREEMTKNQVSLTCLVKGFYPSDIAVEWESNGQPENNYKTTPPMLDSDGSFFLYSKLTVDKSRWQQGNVFSCSVMHEALHNHYTQKSLSLSPGK

SEQ ID NO: 111 - protein, 326 aa, Artificial Sequence
  Synthetic: G2-G2.3-G1-G2-AY
ASTKGPSVFPLAPCSRSTSESTAALGCLVKDYFPEPVTVSWNSGALTSGVHTFPAVLQSSGLYSLSSVVTVPSSNFGTQTYTCNVDHKPSNTKVDKTVERKSCVECPPCPAPELLGGPSVFLFPPKPKDTLMISRTPEVTCVVVDVSHEDPEVKFNWYVDGVEVHNAKTKPREEQYNSTYRVVSVLTVLHQDWLNGKEYKCKVSNKALPAPIEKTISKAKGQPREPQVYTLPPSREEMTKNQVSLTCLVKGFYPSDIAVEWESNGQPENNYKTTPPMLDSDGSFFLYSKLTVDKSRWQQGNVFSCSVMHEALHNHYTQKSLSLSPG

SEQ ID NO: 112 - protein, 327 aa, Artificial Sequence
  Synthetic: G2.5-G2.3-G1-G2-AY
ASTKGPSVFPLAPSSRSTSESTAALGCLVKDYFPEPVTVSWNSGALTSGVHTFPAVLQSSGLYSLSSVVTVPSSNFGTQTYTCNVDHKPSNTKVDKTVERKSCVECPPCPAPELLGGPSVFLFPPKPKDTLMISRTPEVTCVVVDVSHEDPEVKFNWYVDGVEVHNAKTKPREEQYNSTYRVVSVLTVLHQDWLNGKEYKCKVSNKALPAPIEKTISKAKGQPREPQVYTLPPSREEMTKNQVSLTCLVKGFYPSDIAVEWESNGQPENNYKTTPPMLDSDGSFFLYSKLTVDKSRWQQGNVFSCSVMHEALHNHYTQKSLSLSPGK

SEQ ID NO: 113 - protein, 326 aa, Artificial Sequence
  Synthetic: G1-G2.3-G1-G1-KH
ASTKGPSVFPLAPSSKSTSGGTAALGCLVKDYFPEPVTVSWNSGALTSGVHTFPAVLQSSGLYSLSSVVTVPSSSLGTQTYICNVNHKPSNTKVDKRVEPKSCVECPPCPAPPVAGPSVFLFPPKPKDTLMISRTPEVTCVVVDVSHEDPEVKFNWYVDGVEVHNAKTKPREEQYNSTYRVVSVLTVLHQDWLNGKEYKCKVSNKALPAPIEKTISKAKGQPREPQVYTLPPSREEMTKNQVSLTCLVKGFYPSDIAVEWESNGQPENNYKTTPPVLDSDGSFFLYSKLTVDKSRWQQGNVFSCSVMHEALHNHYTQKSLSLSPGK

SEQ ID NO: 114 - protein, 330 aa, Artificial Sequence
  Synthetic: G2-G1-G2-G2-AY
ASTKGPSVFPLAPCSRSTSESTAALGCLVKDYFPEPVTVSWNSGALTSGVHTFPAVLQSSGLYSLSSVVTVPSSNFGTQTYTCNVDHKPSNTKVDKTVERKSCDKTHTCPPCPAPELLGGPSVFLFPPKPKDTLMISRTPEVTCVVVDVSHEDPEVQFNWYVDGVEVHNAKTKPREEQFNSTFRVVSVLTVVHQDWLNGKEYKCKVSNKGLPAPIEKTISKTKGQPREPQVYTLPPSREEMTKNQVSLTCLVKGFYPSDIAVEWESNGQPENNYKTTPPMLDSDGSFFLYSKLTVDKSRWQQGNVFSCSVMHEALHNHYTQKSLSLSPGK

SEQ ID NO: 115 - protein, 330 aa, Artificial Sequence
  Synthetic: G2.5-G1-G2-G2-AY
ASTKGPSVFPLAPSSRSTSESTAALGCLVKDYFPEPVTVSWNSGALTSGVHTFPAVLQSSGLYSLSSVVTVPSSNFGTQTYTCNVDHKPSNTKVDKTVERKSCDKTHTCPPCPAPELLGGPSVFLFPPKPKDTLMISRTPEVTCVVVDVSHEDPEVQFNWYVDGVEVHNAKTKPREEQFNSTFRVVSVLTVVHQDWLNGKEYKCKVSNKGLPAPIEKTISKTKGQPREPQVYTLPPSREEMTKNQVSLTCLVKGFYPSDIAVEWESNGQPENNYKTTPPMLDSDGSFFLYSKLTVDKSRWQQGNVFSCSVMHEALHNHYTQKSLSLSPGK

SEQ ID NO: 116 - protein, 327 aa, Artificial Sequence
  Synthetic: G1-G2-G1-G1-AY
ASTKGPSVFPLAPSSKSTSGGTAALGCLVKDYFPEPVTVSWNSGALTSGVHTFPAVLQSSGLYSLSSVVTVPSSSLGTQTYICNVNHKPSNTKVDKRVEPKSCVECPPCPAPELLGGPSVFLFPPKPKDTLMISRTPEVTCVVVDVSHEDPEVKFNWYVDGVEVHNAKTKPREEQYNSTYRVVSVLTVLHQDWLNGKEYKCKVSNKALPAPIEKTISKAKGQPREPQVYTLPPSREEMTKNQVSLTCLVKGFYPSDIAVEWESNGQPENNYKTTPPVLDSDGSFFLYSKLTVDKSRWQQGNVFSCSVMHEALHNHYTQKSLSLSPGK

SEQ ID NO: 117 - protein, 328 aa, Artificial Sequence
  Synthetic: G2-G1-G2-G2-KH
ASTKGPSVFPLAPCSRSTSESTAALGCLVKDYFPEPVTVSWNSGALTSGVHTFPAVLQSSGLYSLSSVVTVPSSNFGTQTYTCNVDHKPSNTKVDKTVERKSCDKTHTCPPCPAPPVAGPSVFLFPPKPKDTLMISRTPEVTCVVVDVSHEDPEVQFNWYVDGVEVHNAKTKPREEQFNSTFRVVSVLTVVHQDWLNGKEYKCKVSNKGLPAPIEKTISKTKGQPREPQVYTLPPSREEMTKNQVSLTCLVKGFYPSDIAVEWESNGQPENNYKTTPPMLDSDGSFFLYSKLTVDKSRWQQGNVFSCSVMHEALHNHYTQKSLSLSPG

SEQ ID NO: 118 - protein, 329 aa, Artificial Sequence
  Synthetic: G2.5-G1-G2-G2-KH
ASTKGPSVFPLAPSSRSTSESTAALGCLVKDYFPEPVTVSWNSGALTSGVHTFPAVLQSSGLYSLSSVVTVPSSNFGTQTYTCNVDHKPSNTKVDKTVERKSCDKTHTCPPCPAPPVAGPSVFLFPPKPKDTLMISRTPEVTCVVVDVSHEDPEVQFNWYVDGVEVHNAKTKPREEQFNSTFRVVSVLTVVHQDWLNGKEYKCKVSNKGLPAPIEKTISKTKGQPREPQVYTLPPSREEMTKNQVSLTCLVKGFYPSDIAVEWESNGQPENNYKTTPPMLDSDGSFFLYSKLTVDKSRWQQGNVFSCSVMHEALHNHYTQKSLSLSPGK

SEQ ID NO: 119 - protein, 323 aa, Artificial Sequence
  Synthetic: IgG1-deltaHinge
ASTKGPSVFPLAPSSKSTSGGTAALGCLVKDYFPEPVTVSWNSGALTSGVHTFPAVLQSSGLYSLSSVVTVPSSSLGTQTYICNVNHKPSNTKVDKRVEPKCPPCPAPELLGGPSVFLFPPKPKDTLMISRTPEVTCVVVDVSHEDPEVKFNWYVDGVEVHNAKTKPREEQYNSTYRVVSVLTVLHQDWLNGKEYKCKVSNKALPAPIEKTISKAKGQPREPQVYTLPPSREEMTKNQVSLTCLVKGFYPSDIAVEWESNGQPENNYKTTPPVLDSDGSFFLYSKLTVDKSRWQQGNVFSCSVMHEALHNHYTQKSLSLSPGK

SEQ ID NO: 120 - protein, 322 aa, Artificial Sequence
  Synthetic: IgG2-deltaHinge
ASTKGPSVFPLAPCSRSTSESTAALGCLVKDYFPEPVTVSWNSGALTSGVHTFPAVLQSSGLYSLSSVVTVPSSNFGTQTYTCNVDHKPSNTKVDKTVERKCPPCPAPPVAGPSVFLFPPKPKDTLMISRTPEVTCVVVDVSHEDPEVQFNWYVDGVEVHNAKTKPREEQFNSTFRVVSVLTVVHQDWLNGKEYKCKVSNKGLPAPIEKTISKTKGQPREPQVYTLPPSREEMTKNQVSLTCLVKGFYPSDIAVEWESNGQPENNYKTTPPMLDSDGSFFLYSKLTVDKSRWQQGNVFSCSVMHEALHNHYTQKSLSLSPGK

SEQ ID NO: 121 - protein, 322 aa, Artificial Sequence
  Synthetic: IgG2.5-deltaHinge
ASTKGPSVFPLAPSSRSTSESTAALGCLVKDYFPEPVTVSWNSGALTSGVHTFPAVLQSSGLYSLSSVVTVPSSNFGTQTYTCNVDHKPSNTKVDKTVERKCPPCPAPPVAGPSVFLFPPKPKDTLMISRTPEVTCVVVDVSHEDPEVQFNWYVDGVEVHNAKTKPREEQFNSTFRVVSVLTVVHQDWLNGKEYKCKVSNKGLPAPIEKTISKTKGQPREPQVYTLPPSREEMTKNQVSLTCLVKGFYPSDIAVEWESNGQPENNYKTTPPMLDSDGSFFLYSKLTVDKSRWQQGNVFSCSVMHEALHNHYTQKSLSLSPGK

SEQ ID NO: 122 - protein, 328 aa, Artificial Sequence
  Synthetic: IgG1-deltaG237
ASTKGPSVFPLAPSSKSTSGGTAALGCLVKDYFPEPVTVSWNSGALTSGVHTFPAVLQSSGLYSLSSVVTVPSSSLGTQTYICNVNHKPSNTKVDKRVEPKSCDKTHTCPPCPAPELLGPSVFLFPPKPKDTLMISRTPEVTCVVVDVSHEDPEVKFNWYVDGVEVHNAKTKPREEQYNSTYRVVSVLTVLHQDWLNGKEYKCKVSNKALPAPIEKTISKAKGQPREPQVYTLPPSREEMTKNQVSLTCLVKGFYPSDIAVEWESNGQPENNYKTTPPVLDSDGSFFLYSKLTVDKSRWQQGNVFSCSVMHEALHNHYTQKSLSLSPG

SEQ ID NO: 123 - protein, 327 aa, Artificial Sequence
  Synthetic: IgG2-plusG237
ASTKGPSVFPLAPCSRSTSESTAALGCLVKDYFPEPVTVSWNSGALTSGVHTFPAVLQSSGLYSLSSVVTVPSSNFGTQTYTCNVDHKPSNTKVDKTVERKSCVECPPCPAPPVAGGPSVFLFPPKPKDTLMISRTPEVTCVVVDVSHEDPEVQFNWYVDGVEVHNAKTKPREEQFNSTFRVVSVLTVVHQDWLNGKEYKCKVSNKGLPAPIEKTISKTKGQPREPQVYTLPPSREEMTKNQVSLTCLVKGFYPSDIAVEWESNGQPENNYKTTPPMLDSDGSFFLYSKLTVDKSRWQQGNVFSCSVMHEALHNHYTQKSLSLSPGK

SEQ ID NO: 124 - protein, 326 aa, Artificial Sequence
  Synthetic: IgG2.4
ASTKGPSVFPLAPCSRSTSESTAALGCLVKDYFPEPVTVSWNSGALTSGVHTFPAVLQSSGLYSLSSVVTVPSSNFGTQTYTCNVDHKPSNTKVDKTVERKCSVECPPCPAPPVAGPSVFLFPPKPKDTLMISRTPEVTCVVVDVSHEDPEVQFNWYVDGVEVHNAKTKPREEQFNSTFRVVSVLTVVHQDWLNGKEYKCKVSNKGLPAPIEKTISKTKGQPREPQVYTLPPSREEMTKNQVSLTCLVKGFYPSDIAVEWESNGQPENNYKTTPPMLDSDGSFFLYSKLTVDKSRWQQGNVFSCSVMHEALHNHYTQKSLSLSPGK

SEQ ID NO: 125 - protein, 326 aa, Artificial Sequence
  Synthetic: IgG2.3/4
ASTKGPSVFPLAPCSRSTSESTAALGCLVKDYFPEPVTVSWNSGALTSGVHTFPAVLQSSGLYSLSSVVTVPSSNFGTQTYTCNVDHKPSNTKVDKTVERKSSVECPPCPAPPVAGPSVFLFPPKPKDTLMISRTPEVTCVVVDVSHEDPEVQFNWYVDGVEVHNAKTKPREEQFNSTFRVVSVLTVVHQDWLNGKEYKCKVSNKGLPAPIEKTISKTKGQPREPQVYTLPPSREEMTKNQVSLTCLVKGFYPSDIAVEWESNGQPENNYKTTPPMLDSDGSFFLYSKLTVDKSRWQQGNVFSCSVMHEALHNHYTQKSLSLSPGK

SEQ ID NO: 126 - protein, 18 aa, Artificial Sequence
  Synthetic: Hinge IgG2 C220S
ERKCSVECPPCPAPPVAG

SEQ ID NO: 127 - protein, 19 aa, Artificial Sequence
  Synthetic: IgG2/IgG1 hybrid hinge C220S
ERKCSVECPPCPAPELLGG

SEQ ID NO: 128 - protein, 14 aa, Artificial Sequence
  Synthetic: Wildtype IgG2 hinge portion
ERKCCVECPPCPAP

SEQ ID NO: 129 - protein, 14 aa, Artificial Sequence
  Synthetic: IgG2 hinge portion C219S
ERKSCVECPPCPAP

SEQ ID NO: 130 - protein, 14 aa, Artificial Sequence
  Synthetic: IgG2 hinge portion C220S
ERKCSVECPPCPAP

SEQ ID NO: 131 - protein, 14 aa, Artificial Sequence
  Synthetic: IgG2 hinge portion C219X
  misc_feature (4)..(4): Xaa can be any naturally occurring amino acid
ERKXCVECPPCPAP

SEQ ID NO: 132 - protein, 14 aa, Artificial Sequence
  Synthetic: IgG2 hinge portion C220X
  misc_feature (5)..(5): Xaa can be any naturally occurring amino acid
ERKCXVECPPCPAP

SEQ ID NO: 133 - protein, 116 aa, Artificial Sequence
  Synthetic: IgG2 CH1+IgG2 hinge (wildtype)
ASTKGPSVFPLAPCSRSTSESTAALGCLVKDYFPEPVTVSWNSGALTSGVHTFPAVLQSSGLYSLSSVVTVPSSNFGTQTYTCNVDHKPSNTKVDKTVERKCCVECPPCPAPPVAG

SEQ ID NO: 134 - protein, 18 aa, Artificial Sequence
  Synthetic: IgG2 with C219X
  misc_feature (4)..(4): Xaa can be any naturally occurring amino acid
ERKXCVECPPCPAPPVAG

SEQ ID NO: 135 - protein, 18 aa, Artificial Sequence
  Synthetic: IgG2 with C220X
  misc_feature (5)..(5): Xaa can be any naturally occurring amino acid
ERKCXVECPPCPAPPVAG

SEQ ID NO: 136 - protein, 19 aa, Artificial Sequence
  Synthetic: IgG2/IgG1 hybrid with C219X
  misc_feature (4)..(4): Xaa can be any naturally occurring amino acid
ERKXCVECPPCPAPELLGG

SEQ ID NO: 137 - protein, 18 aa, Artificial Sequence
  Synthetic: IgG2/IgG1 hybrid with C220X
ERKCVECPPCPAPELLGG

SEQ ID NO: 138 - protein, 18 aa, Artificial Sequence
  Synthetic: IgG2/IgG1 hybrid deltaG
ERKCCVECPPCPAPELLG

SEQ ID NO: 139 - protein, 18 aa, Artificial Sequence
  Synthetic: IgG2/IgG1 hybrid with C219S deltaG
ERKSCVECPPCPAPELLG

SEQ ID NO: 140 - protein, 18 aa, Artificial Sequence
  Synthetic: IgG2/IgG1 hybrid with C220S deltaG
ERKCSVECPPCPAPELLG

SEQ ID NO: 141 - protein, 18 aa, Artificial Sequence
  Synthetic: IgG2/IgG1 hybrid with C219X deltaG
  misc_feature (4)..(4): Xaa can be any naturally occurring amino acid
ERKXCVECPPCPAPELLG

SEQ ID NO: 142 - protein, 18 aa, Artificial Sequence
  Synthetic: IgG2/IgG1 hybrid with C220X deltaG
  misc_feature (5)..(5): Xaa can be any naturally occurring amino acid
ERKCXVECPPCPAPELLG

SEQ ID NO: 143 - protein, 19 aa, Artificial Sequence
  Synthetic: Wildtype IgG2 with C-terminal X
  misc_feature (19)..(19): Xaa can be any naturally occurring amino acid
ERKCCVECPPCPAPPVAGX

SEQ ID NO: 144 - protein, 19 aa, Artificial Sequence
  Synthetic: IgG2 with C219S with C-terminal X
  misc_feature (19)..(19): Xaa can be any naturally occurring amino acid
ERKSCVECPPCPAPPVAGX

SEQ ID NO: 145 - protein, 19 aa, Artificial Sequence
  Synthetic: IgG2 with C220S with C-terminal X
  misc_feature (19)..(19): Xaa can be any naturally occurring amino acid
ERKCSVECPPCPAPPVAGX

SEQ ID NO: 146 - protein, 19 aa, Artificial Sequence
  Synthetic: IgG2 with C219X with C-terminal X
  misc_feature (4)..(4): Xaa can be any naturally occurring amino acid
  misc_feature (19)..(19): Xaa can be any naturally occurring amino acid
ERKXCVECPPCPAPPVAGX

SEQ ID NO: 147 - protein, 19 aa, Artificial Sequence
  Synthetic: IgG2 with C220X with C-terminal X
  misc_feature (5)..(5): Xaa can be any naturally occurring amino acid
  misc_feature (19)..(19): Xaa can be any naturally occurring amino acid
ERKCXVECPPCPAPPVAGX

SEQ ID NO: 148 - protein, 4 aa, Artificial Sequence
  Synthetic: IgG2 hinge portion
PVAG

SEQ ID NO: 149 - protein, 7 aa, Artificial Sequence
  Synthetic: IgG1 hinge portion
SCDKTHT

SEQ ID NO: 150 - protein, 4 aa, Artificial Sequence
  Synthetic: IgG1 hinge portion 1
ELLG

SEQ ID NO: 151 - protein, 5 aa, Artificial Sequence
  Synthetic: IgG1 hinge portion 2
ELLGG

SEQ ID NO: 152 - protein, 326 aa, Artificial Sequence
  Synthetic: IgG2.3-V13
ASTKGPSVFPLAPCSRSTSESTAALGCLVKDYFPEPVTVSWNSGALTSGVHTFPAVLQSSGLYSLSSVVTVPSSNFGTQTYTCNVDHKPSNTKVDKTVERKSCVECPPCPAPPVAGDSVFLFPPKPKDTLMISRTPEVTCVVVDVSHEDPEVQFNWYVDGVEVHNAKTKPREEQFNSTFRVVSVLTVVHQDWLNGKEYKCKVSNKGLPAPIEKTISKTKGQPREPQVYTLPPSREEMTKNQVSLTCLVKGFYPSDIAVEWESNGQPENNYKTTPPMLDSDGSFFLYSKLTVDKSRWQQGNVFSCSVMHEALHNHYTQKSLSLSPGK

SEQ ID NO: 153 - protein, 326 aa, Artificial Sequence
  Synthetic: IgG2.3-V14
ASTKGPSVFPLAPCSRSTSESTAALGCLVKDYFPEPVTVSWNSGALTSGVHTFPAVLQSSGLYSLSSVVTVPSSNFGTQTYTCNVDHKPSNTKVDKTVERKSCVECPPCPAPPVAGDSVFLFPPKPKDTLMISRTPEVTCVVVDVSHEDGEVQFNWYVDGVEVHNAKTKPREEQFNSTFRVVSVLTVVHQDWLNGKEYKCKVSNKGLPAPIEKTISKTKGQPREPQVYTLPPSREEMTKNQVSLTCLVKGFYPSDIAVEWESNGQPENNYKTTPPMLDSDGSFFLYSKLTVDKSRWQQGNVFSCSVMHEALHNHYTQKSLSLSPGK

SEQ ID NO: 154 - protein, 326 aa, Artificial Sequence
  Synthetic: IgG2.3-V15
ASTKGPSVFPLAPCSRSTSESTAALGCLVKDYFPEPVTVSWNSGALTSGVHTFPAVLQSSGLYSLSSVVTVPSSNFGTQTYTCNVDHKPSNTKVDKTVERKSCVECPPCPAPPVAGDSVFLFPPKPKDTLMISRTPEVTCVVVDVSDEDGEVQFNWYVDGVEVHNAKTKPREEQFNSTFRVVSVLTVVHQDWLNGKEYKCKVSNKGLPAPIEKTISKTKGQPREPQVYTLPPSREEMTKNQVSLTCLVKGFYPSDIAVEWESNGQPENNYKTTPPMLDSDGSFFLYSKLTVDKSRWQQGNVFSCSVMHEALHNHYTQKSLSLSPGK

SEQ ID NO: 155 - protein, 326 aa, Artificial Sequence
  Synthetic: IgG2.3-V16
ASTKGPSVFPLAPCSRSTSESTAALGCLVKDYFPEPVTVSWNSGALTSGVHTFPAVLQSSGLYSLSSVVTVPSSNFGTQTYTCNVDHKPSNTKVDKTVERKSCVECPPCPAPPVAGDSVFLFPPKPKDTLMISRTPEVTCVVVDVSHEDGEVQFNWYVDGVEVHNAKTKPREEQFNSTFRVVSVLTVVHQDWLNGKEYKCKVSNKGLPRPIEKTISKTKGQPREPQVYTLPPSREEMTKNQVSLTCLVKGFYPSDIAVEWESNGQPENNYKTTPPMLDSDGSFFLYSKLTVDKSRWQQGNVFSCSVMHEALHNHYTQKSLSLSPGK

SEQ ID NO: 156 - protein, 326 aa, Artificial Sequence
  Synthetic: IgG2.3-V17
ASTKGPSVFPLAPCSRSTSESTAALGCLVKDYFPEPVTVSWNSGALTSGVHTFPAVLQSSGLYSLSSVVTVPSSNFGTQTYTCNVDHKPSNTKVDKTVERKSCVECPPCPAPPVAGDSVFLFPPKPKDTLMISRTPEVTCVVVDVSDEDGEVQFNWYVDGVEVHNAKTKPREEQFNSTFRVVSVLTVVHQDWLNGKEYKCKVSNKGLPRPIEKTISKTKGQPREPQVYTLPPSREEMTKNQVSLTCLVKGFYPSDIAVEWESNGQPENNYKTTPPMLDSDGSFFLYSKLTVDKSRWQQGNVFSCSVMHEALHNHYTQKSLSLSPGK

SEQ ID NO: 157 - protein, 326 aa, Artificial Sequence
  Synthetic: IgG2.3-V18
ASTKGPSVFPLAPCSRSTSESTAALGCLVKDYFPEPVTVSWNSGALTSGVHTFPAVLQSSGLYSLSSVVTVPSSNFGTQTYTCNVDHKPSNTKVDKTVERKSCVECPPCPAPPVAGPSVFLFPPKPKDTLMISRTPEVTCVVVDVEHEDPEVQFNWYVDGVEVHNAKTKPREEQFNSTFRVVSVLTVVHQDWLNGKEYKCKVSNKGLPAPIEKTISKTKGQPREPQVYTLPPSREEMTKNQVSLTCLVKGFYPSDIAVEWESNGQPENNYKTTPPMLDSDGSFFLYSKLTVDKSRWQQGNVFSCSVMHEALHNHYTQKSLSLSPGK

SEQ ID NO: 158 - protein, 326 aa, Artificial Sequence
  Synthetic: IgG2.3-V19
ASTKGPSVFPLAPCSRSTSESTAALGCLVKDYFPEPVTVSWNSGALTSGVHTFPAVLQSSGLYSLSSVVTVPSSNFGTQTYTCNVDHKPSNTKVDKTVERKSCVECPPCPAPPVAGPSVFLFPPKPKDTLMISRTPEVTCVVVDVEHEDPEVQFNWYVDGVEVHNAKTKPREEQFNSTFRVVSVLTVVHQDWLNGKEYKCKVSNKGFPAPIEKTISKTKGQPREPQVYTLPPSREEMTKNQVSLTCLVKGFYPSDIAVEWESNGQPENNYKTTPPMLDSDGSFFLYSKLTVDKSRWQQGNVFSCSVMHEALHNHYTQKSLSLSPGK

SEQ ID NO: 159 - protein, 327 aa, Artificial Sequence; identical to SEQ ID NO: 80
  Synthetic: IgG2.3G1

SEQ ID NO: 160 - protein, 327 aa, Artificial Sequence
  Synthetic: IgG2.3G1-V20
ASTKGPSVFPLAPCSRSTSESTAALGCLVKDYFPEPVTVSWNSGALTSGVHTFPAVLQSSGLYSLSSVVTVPSSNFGTQTYTCNVDHKPSNTKVDKTVERKSCVECPPCPAPELLGGDSVFLFPPKPKDTLMISRTPEVTCVVVDVSHEDPEVKFNWYVDGVEVHNAKTKPREEQYNSTYRVVSVLTVLHQDWLNGKEYKCKVSNKALPAPIEKTISKAKGQPREPQVYTLPPSREEMTKNQVSLTCLVKGFYPSDIAVEWESNGQPENNYKTTPPVLDSDGSFFLYSKLTVDKSRWQQGNVFSCSVMHEALHNHYTQKSLSLSPGK

SEQ ID NO: 161 - protein, 327 aa, Artificial Sequence
  Synthetic: IgG2.3G1-V21
ASTKGPSVFPLAPCSRSTSESTAALGCLVKDYFPEPVTVSWNSGALTSGVHTFPAVLQSSGLYSLSSVVTVPSSNFGTQTYTCNVDHKPSNTKVDKTVERKSCVECPPCPAPELLGGDSVFLFPPKPKDTLMISRTPEVTCVVVDVSHEDGEVKFNWYVDGVEVHNAKTKPREEQYNSTYRVVSVLTVLHQDWLNGKEYKCKVSNKALPAPIEKTISKAKGQPREPQVYTLPPSREEMTKNQVSLTCLVKGFYPSDIAVEWESNGQPENNYKTTPPVLDSDGSFFLYSKLTVDKSRWQQGNVFSCSVMHEALHNHYTQKSLSLSPGK

SEQ ID NO: 162 - protein, 327 aa, Artificial Sequence
  Synthetic: IgG2.3G1-V22
ASTKGPSVFPLAPCSRSTSESTAALGCLVKDYFPEPVTVSWNSGALTSGVHTFPAVLQSSGLYSLSSVVTVPSSNFGTQTYTCNVDHKPSNTKVDKTVERKSCVECPPCPAPELLGGDSVFLFPPKPKDTLMISRTPEVTCVVVDVSDEDGEVKFNWYVDGVEVHNAKTKPREEQYNSTYRVVSVLTVLHQDWLNGKEYKCKVSNKALPAPIEKTISKAKGQPREPQVYTLPPSREEMTKNQVSLTCLVKGFYPSDIAVEWESNGQPENNYKTTPPVLDSDGSFFLYSKLTVDKSRWQQGNVFSCSVMHEALHNHYTQKSLSLSPGK

SEQ ID NO: 163 - protein, 327 aa, Artificial Sequence
  Synthetic: IgG2.3G1-V23
ASTKGPSVFPLAPCSRSTSESTAALGCLVKDYFPEPVTVSWNSGALTSGVHTFPAVLQSSGLYSLSSVVTVPSSNFGTQTYTCNVDHKPSNTKVDKTVERKSCVECPPCPAPELLGGDSVFLFPPKPKDTLMISRTPEVTCVVVDVSHEDGEVKFNWYVDGVEVHNAKTKPREEQYNSTYRVVSVLTVLHQDWLNGKEYKCKVSNKALPRPIEKTISKAKGQPREPQVYTLPPSREEMTKNQVSLTCLVKGFYPSDIAVEWESNGQPENNYKTTPPVLDSDGSFFLYSKLTVDKSRWQQGNVFSCSVMHEALHNHYTQKSLSLSPGK

SEQ ID NO: 164 - protein, 327 aa, Artificial Sequence
  Synthetic: IgG2.3G1-V24
ASTKGPSVFPLAPCSRSTSESTAALGCLVKDYFPEPVTVSWNSGALTSGVHTFPAVLQSSGLYSLSSVVTVPSSNFGTQTYTCNVDHKPSNTKVDKTVERKSCVECPPCPAPELLGGDSVFLFPPKPKDTLMISRTPEVTCVVVDVSDEDGEVKFNWYVDGVEVHNAKTKPREEQYNSTYRVVSVLTVLHQDWLNGKEYKCKVSNKALPRPIEKTISKAKGQPREPQVYTLPPSREEMTKNQVSLTCLVKGFYPSDIAVEWESNGQPENNYKTTPPVLDSDGSFFLYSKLTVDKSRWQQGNVFSCSVMHEALHNHYTQKSLSLSPGK

SEQ ID NO: 165 - protein, 327 aa, Artificial Sequence
  Synthetic: IgG2.3G1-V25
ASTKGPSVFPLAPCSRSTSESTAALGCLVKDYFPEPVTVSWNSGALTSGVHTFPAVLQSSGLYSLSSVVTVPSSNFGTQTYTCNVDHKPSNTKVDKTVERKSCVECPPCPAPELLGDDSVFLFPPKPKDTLMISRTPEVTCVVVDVSDEDGEVKFNWYVDGVEVHNAKTKPREEQYNSTYRVVSVLTVLHQDWLNGKEYKCKVSNKALPRPIEKTISKAKGQPREPQVYTLPPSREEMTKNQVSLTCLVKGFYPSDIAVEWESNGQPENNYKTTPPVLDSDGSFFLYSKLTVDKSRWQQGNVFSCSVMHEALHNHYTQKSLSLSPGK

SEQ ID NO: 166 - protein, 327 aa, Artificial Sequence
  Synthetic: IgG2.3G1-V26
ASTKGPSVFPLAPCSRSTSESTAALGCLVKDYFPEPVTVSWNSGALTSGVHTFPAVLQSSGLYSLSSVVTVPSSNFGTQTYTCNVDHKPSNTKVDKTVERKSCVECPPCPAPDLLGDDSVFLFPPKPKDTLMISRTPEVTCVVVDVSDEDGEVKFNWYVDGVEVHNAKTKPREEQYNSTYRVVSVLTVLHQDWLNGKEYKCKVSNKALPRPIEKTISKAKGQPREPQVYTLPPSREEMTKNQVSLTCLVKGFYPSDIAVEWESNGQPENNYKTTPPVLDSDGSFFLYSKLTVDKSRWQQGNVFSCSVMHEALHNHYTQKSLSLSPGK

SEQ ID NO: 167 - protein, 327 aa, Artificial Sequence
  Synthetic: IgG2.3G1-V27
ASTKGPSVFPLAPCSRSTSESTAALGCLVKDYFPEPVTVSWNSGALTSGVHTFPAVLQSSGLYSLSSVVTVPSSNFGTQTYTCNVDHKPSNTKVDKTVERKSCVECPPCPAPELLGGPSVFLFPPKPKDTLMISRTPEVTCVVVDVEHEDPEVKFNWYVDGVEVHNAKTKPREEQYNSTYRVVSVLTVLHQDWLNGKEYKCKVSNKALPAPIEKTISKAKGQPREPQVYTLPPSREEMTKNQVSLTCLVKGFYPSDIAVEWESNGQPENNYKTTPPVLDSDGSFFLYSKLTVDKSRWQQGNVFSCSVMHEALHNHYTQKSLSLSPGK

SEQ ID NO: 168 - protein, 327 aa, Artificial Sequence
  Synthetic: IgG2.3G1-V28
ASTKGPSVFPLAPCSRSTSESTAALGCLVKDYFPEPVTVSWNSGALTSGVHTFPAVLQSSGLYSLSSVVTVPSSNFGTQTYTCNVDHKPSNTKVDKTVERKSCVECPPCPAPELLGGPSVFLFPPKPKDTLMISRTPEVTCVVVDVEHEDPEVKFNWYVDGVEVHNAKTKPREEQYNSTYRVVSVLTVLHQDWLNGKEYKCKVSNKAFPAPIEKTISKAKGQPREPQVYTLPPSREEMTKNQVSLTCLVKGFYPSDIAVEWESNGQPENNYKTTPPVLDSDGSFFLYSKLTVDKSRWQQGNVFSCSVMHEALHNHYTQKSLSLSPGK

SEQ ID NO: 169 - protein, 327 aa, Artificial Sequence
  Synthetic: IgG2.3G1-AY-V9-D270E
ASTKGPSVFPLAPCSRSTSESTAALGCLVKDYFPEPVTVSWNSGALTSGVHTFPAVLQSSGLYSLSSVVTVPSSNFGTQTYTCNVDHKPSNTKVDKTVERKSCVECPPCPAPELLGDDSVFLFPPKPKDTLMISRTPEVTCVVVDVSHEEGEVKFNWYVDGVEVHNAKTKPREEQYNSTYRVVSVLTVLHQDWLNGKEYKCKVSNKALPRPIEKTISKAKGQPREPQVYTLPPSREEMTKNQVSLTCLVKGFYPSDIAVEWESNGQPENNYKTTPPVLDSDGSFFLYSKLTVDKSRWQQGNVFSCSVMHEALHNHYTQKSLSLSPGK

SEQ ID NO: 170 - protein, 327 aa, Artificial Sequence; identical to SEQ ID NO: 165
  Synthetic: IgG2.3G1-AY-V11

SEQ ID NO: 171 - protein, 327 aa, Artificial Sequence
  Synthetic: IgG2.5G1-AY-V9-D270E
ASTKGPSVFPLAPSSRSTSESTAALGCLVKDYFPEPVTVSWNSGALTSGVHTFPAVLQSSGLYSLSSVVTVPSSNFGTQTYTCNVDHKPSNTKVDKTVERKCCVECPPCPAPELLGDDSVFLFPPKPKDTLMISRTPEVTCVVVDVSHEEGEVKFNWYVDGVEVHNAKTKPREEQYNSTYRVVSVLTVLHQDWLNGKEYKCKVSNKALPRPIEKTISKAKGQPREPQVYTLPPSREEMTKNQVSLTCLVKGFYPSDIAVEWESNGQPENNYKTTPPVLDSDGSFFLYSKLTVDKSRWQQGNVFSCSVMHEALHNHYTQKSLSLSPGK

SEQ ID NO: 172 - protein, 327 aa, Artificial Sequence
  Synthetic: IgG2.5G1-AY-V11
ASTKGPSVFPLAPSSRSTSESTAALGCLVKDYFPEPVTVSWNSGALTSGVHTFPAVLQSSGLYSLSSVVTVPSSNFGTQTYTCNVDHKPSNTKVDKTVERKCCVECPPCPAPELLGDDSVFLFPPKPKDTLMISRTPEVTCVVVDVSDEDGEVKFNWYVDGVEVHNAKTKPREEQYNSTYRVVSVLTVLHQDWLNGKEYKCKVSNKALPRPIEKTISKAKGQPREPQVYTLPPSREEMTKNQVSLTCLVKGFYPSDIAVEWESNGQPENNYKTTPPVLDSDGSFFLYSKLTVDKSRWQQGNVFSCSVMHEALHNHYTQKSLSLSPGK

SEQ ID NO: 173 - protein, 330 aa, Artificial Sequence
  Synthetic: IgG1f-GASDALIE
ASTKGPSVFPLAPSSKSTSGGTAALGCLVKDYFPEPVTVSWNSGALTSGVHTFPAVLQSSGLYSLSSVVTVPSSSLGTQTYICNVNHKPSNTKVDKRVEPKSCDKTHTCPPCPAPELLAGPDVFLFPPKPKDTLMISRTPEVTCVVVDVSHEDPEVKFNWYVDGVEVHNAKTKPREEQYNSTYRVVSVLTVLHQDWLNGKEYKCKVSNKALPLPEEKTISKAKGQPREPQVYTLPPSREEMTKNQVSLTCLVKGFYPSDIAVEWESNGQPENNYKTTPPVLDSDGSFFLYSKLTVDKSRWQQGNVFSCSVMHEALHNHYTQKSLSLSPGK

SEQ ID NO: 174 - protein, 330 aa, Artificial Sequence
  Synthetic: IgG1f-G236A
ASTKGPSVFPLAPSSKSTSGGTAALGCLVKDYFPEPVTVSWNSGALTSGVHTFPAVLQSSGLYSLSSVVTVPSSSLGTQTYICNVNHKPSNTKVDKRVEPKSCDKTHTCPPCPAPELLAGPSVFLFPPKPKDTLMISRTPEVTCVVVDVSHEDPEVKFNWYVDGVEVHNAKTKPREEQYNSTYRVVSVLTVLHQDWLNGKEYKCKVSNKALPAPIEKTISKAKGQPREPQVYTLPPSREEMTKNQVSLTCLVKGFYPSDIAVEWESNGQPENNYKTTPPVLDSDGSFFLYSKLTVDKSRWQQGNVFSCSVMHEALHNHYTQKSLSLSPGK

SEQ ID NO: 175 - protein, 327 aa, Artificial Sequence
  Synthetic: IgG2.3G1-AY-G236A
ASTKGPSVFPLAPCSRSTSESTAALGCLVKDYFPEPVTVSWNSGALTSGVHTFPAVLQSSGLYSLSSVVTVPSSNFGTQTYTCNVDHKPSNTKVDKTVERKSCVECPPCPAPELLAGPSVFLFPPKPKDTLMISRTPEVTCVVVDVSHEDPEVKFNWYVDGVEVHNAKTKPREEQYNSTYRVVSVLTVLHQDWLNGKEYKCKVSNKALPAPIEKTISKAKGQPREPQVYTLPPSREEMTKNQVSLTCLVKGFYPSDIAVEWESNGQPENNYKTTPPVLDSDGSFFLYSKLTVDKSRWQQGNVFSCSVMHEALHNHYTQKSLSLSPGK

SEQ ID NO: 176 - protein, 327 aa, Artificial Sequence
  Synthetic: IgG2.3G1-AY-GASDALIE
ASTKGPSVFPLAPCSRSTSESTAALGCLVKDYFPEPVTVSWNSGALTSGVHTFPAVLQSSGLYSLSSVVTVPSSNFGTQTYTCNVDHKPSNTKVDKTVERKSCVECPPCPAPELLAGPDVFLFPPKPKDTLMISRTPEVTCVVVDVSHEDPEVKFNWYVDGVEVHNAKTKPREEQYNSTYRVVSVLTVLHQDWLNGKEYKCKVSNKALPLPEEKTISKAKGQPREPQVYTLPPSREEMTKNQVSLTCLVKGFYPSDIAVEWESNGQPENNYKTTPPVLDSDGSFFLYSKLTVDKSRWQQGNVFSCSVMHEALHNHYTQKSLSLSPGK

SEQ ID NO: 177 - protein, 327 aa, Artificial Sequence
  Synthetic: IgG2.5G1-AY-G236A
ASTKGPSVFPLAPSSRSTSESTAALGCLVKDYFPEPVTVSWNSGALTSGVHTFPAVLQSSGLYSLSSVVTVPSSNFGTQTYTCNVDHKPSNTKVDKTVERKCCVECPPCPAPELLAGPSVFLFPPKPKDTLMISRTPEVTCVVVDVSHEDPEVKFNWYVDGVEVHNAKTKPREEQYNSTYRVVSVLTVLHQDWLNGKEYKCKVSNKALPAPIEKTISKAKGQPREPQVYTLPPSREEMTKNQVSLTCLVKGFYPSDIAVEWESNGQPENNYKTTPPVLDSDGSFFLYSKLTVDKSRWQQGNVFSCSVMHEALHNHYTQKSLSLSPGK

SEQ ID NO: 178 - protein, 326 aa, Artificial Sequence
  Synthetic: IgG2.5G1-AY-GASDALIE
STKGPSVFPLAPSSRSTSESTAALGCLVKDYFPEPVTVSWNSGALTSGVHTFPAVLQSSGLYSLSSVVTVPSSNFGTQTYTCNVDHKPSNTKVDKTVERKCCVECPPCPAPELLAGPDVFLFPPKPKDTLMISRTPEVTCVVVDVSHEDPEVKFNWYVDGVEVHNAKTKPREEQYNSTYRVVSVLTVLHQDWLNGKEYKCKVSNKALPLPEEKTISKAKGQPREPQVYTLPPSREEMTKNQVSLTCLVKGFYPSDIAVEWESNGQPENNYKTTPPVLDSDGSFFLYSKLTVDKSRWQQGNVFSCSVMHEALHNHYTQKSLSLSPGK

SEQ ID NO: 179 - protein, 327 aa, Artificial Sequence
  Synthetic: IgG2.3G1.1f-AY
ASTKGPSVFPLAPCSRSTSESTAALGCLVKDYFPEPVTVSWNSGALTSGVHTFPAVLQSSGLYSLSSVVTVPSSNFGTQTYTCNVDHKPSNTKVDKTVERKSCVECPPCPAPEAEGAPSVFLFPPKPKDTLMISRTPEVTCVVVDVSHEDPEVKFNWYVDGVEVHNAKTKPREEQYNSTYRVVSVLTVLHQDWLNGKEYKCKVSNKALPSSIEKTISKAKGQPREPQVYTLPPSREEMTKNQVSLTCLVKGFYPSDIAVEWESNGQPENNYKTTPPVLDSDGSFFLYSKLTVDKSRWQQGNVFSCSVMHEALHNHYTQKSLSLSPGK

SEQ ID NO: 180 - protein, 327 aa, Artificial Sequence
  Synthetic: IgG2.3G1.3f-AY
ASTKGPSVFPLAPCSRSTSESTAALGCLVKDYFPEPVTVSWNSGALTSGVHTFPAVLQSSGLYSLSSVVTVPSSNFGTQTYTCNVDHKPSNTKVDKTVERKSCVECPPCPAPEAEGAPSVFLFPPKPKDTLMISRTPEVTCVVVDVSHEDPEVKFNWYVDGVEVHNAKTKPREEQYNSTYRVVSVLTVLHQDWLNGKEYKCKVSNKALPAPIEKTISKAKGQPREPQVYTLPPSREEMTKNQVSLTCLVKGFYPSDIAVEWESNGQPENNYKTTPPVLDSDGSFFLYSKLTVDKSRWQQGNVFSCSVMHEALHNHYTQKSLSLSPGK

SEQ ID NO: 181 - protein, 327 aa, Artificial Sequence
  Synthetic: IgG2.3G1-AY-D265A
ASTKGPSVFPLAPCSRSTSESTAALGCLVKDYFPEPVTVSWNSGALTSGVHTFPAVLQSSGLYSLSSVVTVPSSNFGTQTYTCNVDHKPSNTKVDKTVERKSCVECPPCPAPELLGGPSVFLFPPKPKDTLMISRTPEVTCVVVAVSHEDPEVKFNWYVDGVEVHNAKTKPREEQYNSTYRVVSVLTVLHQDWLNGKEYKCKVSNKALPAPIEKTISKAKGQPREPQVYTLPPSREEMTKNQVSLTCLVKGFYPSDIAVEWESNGQPENNYKTTPPVLDSDGSFFLYSKLTVDKSRWQQGNVFSCSVMHEALHNHYTQKSLSLSPGK

SEQ ID NO: 182 - protein, 327 aa, Artificial Sequence
  Synthetic: IgG2.3G1-AY-N297A
ASTKGPSVFPLAPCSRSTSESTAALGCLVKDYFPEPVTVSWNSGALTSGVHTFPAVLQSSGLYSLSSVVTVPSSNFGTQTYTCNVDHKPSNTKVDKTVERKSCVECPPCPAPELLGGPSVFLFPPKPKDTLMISRTPEVTCVVVDVSHEDPEVKFNWYVDGVEVHNAKTKPREEQYASTYRVVSVLTVLHQDWLNGKEYKCKVSNKALPAPIEKTISKAKGQPREPQVYTLPPSREEMTKNQVSLTCLVKGFYPSDIAVEWESNGQPENNYKTTPPVLDSDGSFFLYSKLTVDKSRWQQGNVFSCSVMHEALHNHYTQKSLSLSPGK

SEQ ID NO: 183 - protein, 327 aa, Artificial Sequence
  Synthetic: IgG2.5G1.1f-AY
ASTKGPSVFPLAPSSRSTSESTAALGCLVKDYFPEPVTVSWNSGALTSGVHTFPAVLQSSGLYSLSSVVTVPSSNFGTQTYTCNVDHKPSNTKVDKTVERKCCVECPPCPAPEAEGAPSVFLFPPKPKDTLMISRTPEVTCVVVDVSHEDPEVKFNWYVDGVEVHNAKTKPREEQYNSTYRVVSVLTVLHQDWLNGKEYKCKVSNKALPSSIEKTISKAKGQPREPQVYTLPPSREEMTKNQVSLTCLVKGFYPSDIAVEWESNGQPENNYKTTPPVLDSDGSFFLYSKLTVDKSRWQQGNVFSCSVMHEALHNHYTQKSLSLSPGK

SEQ ID NO: 184 - protein, 327 aa, Artificial Sequence
  Synthetic: IgG2.5G1.3f-AY
ASTKGPSVFPLAPSSRSTSESTAALGCLVKDYFPEPVTVSWNSGALTSGVHTFPAVLQSSGLYSLSSVVTVPSSNFGTQTYTCNVDHKPSNTKVDKTVERKCCVECPPCPAPEAEGAPSVFLFPPKPKDTLMISRTPEVTCVVVDVSHEDPEVKFNWYVDGVEVHNAKTKPREEQYNSTYRVVSVLTVLHQDWLNGKEYKCKVSNKALPAPIEKTISKAKGQPREPQVYTLPPSREEMTKNQVSLTCLVKGFYPSDIAVEWESNGQPENNYKTTPPVLDSDGSFFLYSKLTVDKSRWQQGNVFSCSVMHEALHNHYTQKSLSLSPGK

SEQ ID NO: 185 - protein, 327 aa, Artificial Sequence
  Synthetic: IgG2.5G1-AY-D265A
ASTKGPSVFPLAPSSRSTSESTAALGCLVKDYFPEPVTVSWNSGALTSGVHTFPAVLQSSGLYSLSSVVTVPSSNFGTQTYTCNVDHKPSNTKVDKTVERKCCVECPPCPAPELLGGPSVFLFPPKPKDTLMISRTPEVTCVVVAVSHEDPEVKFNWYVDGVEVHNAKTKPREEQYNSTYRVVSVLTVLHQDWLNGKEYKCKVSNKALPAPIEKTISKAKGQPREPQVYTLPPSREEMTKNQVSLTCLVKGFYPSDIAVEWESNGQPENNYKTTPPVLDSDGSFFLYSKLTVDKSRWQQGNVFSCSVMHEALHNHYTQKSLSLSPGK

SEQ ID NO: 186 - protein, 327 aa, Artificial Sequence
  Synthetic: IgG2.5G1-AY-N297A
ASTKGPSVFPLAPSSRSTSESTAALGCLVKDYFPEPVTVSWNSGALTSGVHTFPAVLQSSGLYSLSSVVTVPSSNFGTQTYTCNVDHKPSNTKVDKTVERKCCVECPPCPAPELLGGPSVFLFPPKPKDTLMISRTPEVTCVVVDVSHEDPEVKFNWYVDGVEVHNAKTKPREEQYASTYRVVSVLTVLHQDWLNGKEYKCKVSNKALPAPIEKTISKAKGQPREPQVYTLPPSREEMTKNQVSLTCLVKGFYPSDIAVEWESNGQPENNYKTTPPVLDSDGSFFLYSKLTVDKSRWQQGNVFSCSVMHEALHNHYTQKSLSLSPGK

SEQ ID NO: 187 - protein, 330 aa, Artificial Sequence
  Synthetic: CT
ASTKGPSVFPLAPSSKSTSGGTAALGCLVKDYFPEPVTVSWNSGALTSGVHTFPAVLQSSGLYSLSSVVTVPSSSLGTQTYICNVNHKPSNTKVDKRVEPKSCDKTHTSPPSPAPELLGGSSVFLFPPKPKDTLMISRTPEVTCVVVDVSHEDPEVKFNWYVDGVEVHNAKTKPREEQYNSTYRVVSVLTVLHQDWLNGKEYKCKVSNKALPAPIEKTISKAKGQPREPQVYTLPPSRDELTKNQVSLTCLVKGFYPSDIAVEWESNGQPENNYKTTPPVLDSDGSFFLYSKLTVDKSRWQQGNVFSCSVMHEALHNHYTQKSLSLSPGK

SEQ ID NO: 188 - protein, 330 aa, Artificial Sequence
  Synthetic: CTf
ASTKGPSVFPLAPSSKSTSGGTAALGCLVKDYFPEPVTVSWNSGALTSGVHTFPAVLQSSGLYSLSSVVTVPSSSLGTQTYICNVNHKPSNTKVDKRVEPKSCDKTHTSPPSPAPELLGGSSVFLFPPKPKDTLMISRTPEVTCVVVDVSHEDPEVKFNWYVDGVEVHNAKTKPREEQYNSTYRVVSVLTVLHQDWLNGKEYKCKVSNKALPAPIEKTISKAKGQPREPQVYTLPPSREEMTKNQVSLTCLVKGFYPSDIAVEWESNGQPENNYKTTPPVLDSDGSFFLYSKLTVDKSRWQQGNVFSCSVMHEALHNHYTQKSLSLSPGK

SEQ ID NO: 189 - protein, 327 aa, Artificial Sequence
  Synthetic: IgG2.3-CT
ASTKGPSVFPLAPCSRSTSESTAALGCLVKDYFPEPVTVSWNSGALTSGVHTFPAVLQSSGLYSLSSVVTVPSSNFGTQTYTCNVDHKPSNTKVDKTVERKSCVESPPSPAPELLGGSSVFLFPPKPKDTLMISRTPEVTCVVVDVSHEDPEVKFNWYVDGVEVHNAKTKPREEQYNSTYRVVSVLTVLHQDWLNGKEYKCKVSNKALPAPIEKTISKAKGQPREPQVYTLPPSRDELTKNQVSLTCLVKGFYPSDIAVEWESNGQPENNYKTTPPVLDSDGSFFLYSKLTVDKSRWQQGNVFSCSVMHEALHNHYTQKSLSLSPGK

SEQ ID NO: 190 - protein, 327 aa, Artificial Sequence
  Synthetic: IgG2.5-CT
ASTKGPSVFPLAPSSRSTSESTAALGCLVKDYFPEPVTVSWNSGALTSGVHTFPAVLQSSGLYSLSSVVTVPSSNFGTQTYTCNVDHKPSNTKVDKTVERKCCVESPPSPAPELLGGSSVFLFPPKPKDTLMISRTPEVTCVVVDVSHEDPEVKFNWYVDGVEVHNAKTKPREEQYNSTYRVVSVLTVLHQDWLNGKEYKCKVSNKALPAPIEKTISKAKGQPREPQVYTLPPSRDELTKNQVSLTCLVKGFYPSDIAVEWESNGQPENNYKTTPPVLDSDGSFFLYSKLTVDKSRWQQGNVFSCSVMHEALHNHYTQKSLSLSPGK

SEQ ID NO: 191 - protein, 330 aa, Artificial Sequence
  Synthetic: IgG1fa-C226S
ASTKGPSVFPLAPSSKSTSGGTAALGCLVKDYFPEPVTVSWNSGALTSGVHTFPAVLQSSGLYSLSSVVTVPSSSLGTQTYICNVNHKPSNTKVDKRVEPKSCDKTHTSPPCPAPELLGGPSVFLFPPKPKDTLMISRTPEVTCVVVDVSHEDPEVKFNWYVDGVEVHNAKTKPREEQYNSTYRVVSVLTVLHQDWLNGKEYKCKVSNKALPAPIEKTISKAKGQPREPQVYTLPPSRDELTKNQVSLTCLVKGFYPSDIAVEWESNGQPENNYKTTPPVLDSDGSFFLYSKLTVDKSRWQQGNVFSCSVMHEALHNHYTQKSLSLSPGK

SEQ ID NO: 192 - protein, 330 aa, Artificial Sequence
  Synthetic: IgG1fa-C229S
ASTKGPSVFPLAPSSKSTSGGTAALGCLVKDYFPEPVTVSWNSGALTSGVHTFPAVLQSSGLYSLSSVVTVPSSSLGTQTYICNVNHKPSNTKVDKRVEPKSCDKTHTCPPSPAPELLGGPSVFLFPPKPKDTLMISRTPEVTCVVVDVSHEDPEVKFNWYVDGVEVHNAKTKPREEQYNSTYRVVSVLTVLHQDWLNGKEYKCKVSNKALPAPIEKTISKAKGQPREPQVYTLPPSRDELTKNQVSLTCLVKGFYPSDIAVEWESNGQPENNYKTTPPVLDSDGSFFLYSKLTVDKSRWQQGNVFSCSVMHEALHNHYTQKSLSLSPGK

SEQ ID NO: 193 - protein, 330 aa, Artificial Sequence
  Synthetic: IgG1fa-C226S,C229S
ASTKGPSVFPLAPSSKSTSGGTAALGCLVKDYFPEPVTVSWNSGALTSGVHTFPAVLQSSGLYSLSSVVTVPSSSLGTQTYICNVNHKPSNTKVDKRVEPKSCDKTHTSPPSPAPELLGGPSVFLFPPKPKDTLMISRTPEVTCVVVDVSHEDPEVKFNWYVDGVEVHNAKTKPREEQYNSTYRVVSVLTVLHQDWLNGKEYKCKVSNKALPAPIEKTISKAKGQPREPQVYTLPPSRDELTKNQVSLTCLVKGFYPSDIAVEWESNGQPENNYKTTPPVLDSDGSFFLYSKLTVDKSRWQQGNVFSCSVMHEALHNHYTQKSLSLSPGK

SEQ ID NO: 194 - protein, 330 aa, Artificial Sequence
  Synthetic: IgG1fa-P238S
ASTKGPSVFPLAPSSKSTSGGTAALGCLVKDYFPEPVTVSWNSGALTSGVHTFPAVLQSSGLYSLSSVVTVPSSSLGTQTYICNVNHKPSNTKVDKRVEPKSCDKTHTCPPCPAPELLGGSSVFLFPPKPKDTLMISRTPEVTCVVVDVSHEDPEVKFNWYVDGVEVHNAKTKPREEQYNSTYRVVSVLTVLHQDWLNGKEYKCKVSNKALPAPIEKTISKAKGQPREPQVYTLPPSRDELTKNQVSLTCLVKGFYPSDIAVEWESNGQPENNYKTTPPVLDSDGSFFLYSKLTVDKSRWQQGNVFSCSVMHEALHNHYTQKSLSLSPGK

SEQ ID NO: 195 - protein, 330 aa, Artificial Sequence
  Synthetic: IgG1fa-C226A
ASTKGPSVFPLAPSSKSTSGGTAALGCLVKDYFPEPVTVSWNSGALTSGVHTFPAVLQSSGLYSLSSVVTVPSSSLGTQTYICNVNHKPSNTKVDKRVEPKSCDKTHTAPPCPAPELLGGPSVFLFPPKPKDTLMISRTPEVTCVVVDVSHEDPEVKFNWYVDGVEVHNAKTKPREEQYNSTYRVVSVLTVLHQDWLNGKEYKCKVSNKALPAPIEKTISKAKGQPREPQVYTLPPSRDELTKNQVSLTCLVKGFYPSDIAVEWESNGQPENNYKTTPPVLDSDGSFFLYSKLTVDKSRWQQGNVFSCSVMHEALHNHYTQKSLSLSPGK

SEQ ID NO: 196 - protein, 330 aa, Artificial Sequence
  Synthetic: IgG1fa-C229A
ASTKGPSVFPLAPSSKSTSGGTAALGCLVKDYFPEPVTVSWNSGALTSGVHTFPAVLQSSGLYSLSSVVTVPSSSLGTQTYICNVNHKPSNTKVDKRVEPKSCDKTHTCPPAPAPELLGGPSVFLFPPKPKDTLMISRTPEVTCVVVDVSHEDPEVKFNWYVDGVEVHNAKTKPREEQYNSTYRVVSVLTVLHQDWLNGKEYKCKVSNKALPAPIEKTISKAKGQPREPQVYTLPPSRDELTKNQVSLTCLVKGFYPSDIAVEWESNGQPENNYKTTPPVLDSDGSFFLYSKLTVDKSRWQQGNVFSCSVMHEALHNHYTQKSLSLSPGK

SEQ ID NO: 197 - protein, 330 aa, Artificial Sequence
  Synthetic: IgG1fa-C226A,C229A
ASTKGPSVFPLAPSSKSTSGGTAALGCLVKDYFPEPVTVSWNSGALTSGVHTFPAVLQSSGLYSLSSVVTVPSSSLGTQTYICNVNHKPSNTKVDKRVEPKSCDKTHTAPPAPAPELLGGPSVFLFPPKPKDTLMISRTPEVTCVVVDVSHEDPEVKFNWYVDGVEVHNAKTKPREEQYNSTYRVVSVLTVLHQDWLNGKEYKCKVSNKALPAPIEKTISKAKGQPREPQVYTLPPSRDELTKNQVSLTCLVKGFYPSDIAVEWESNGQPENNYKTTPPVLDSDGSFFLYSKLTVDKSRWQQGNVFSCSVMHEALHNHYTQKSLSLSPGK

SEQ ID NO: 198 - protein, 330 aa, Artificial Sequence
  Synthetic: IgG1fa-P238K
ASTKGPSVFPLAPSSKSTSGGTAALGCLVKDYFPEPVTVSWNSGALTSGVHTFPAVLQSSGLYSLSSVVTVPSSSLGTQTYICNVNHKPSNTKVDKRVEPKSCDKTHTCPPCPAPELLGGKSVFLFPPKPKDTLMISRTPEVTCVVVDVSHEDPEVKFNWYVDGVEVHNAKTKPREEQYNSTYRVVSVLTVLHQDWLNGKEYKCKVSNKALPAPIEKTISKAKGQPREPQVYTLPPSRDELTKNQVSLTCLVKGFYPSDIAVEWESNGQPENNYKTTPPVLDSDGSFFLYSKLTVDKSRWQQGNVFSCSVMHEALHNHYTQKSLSLSPGK

SEQ ID NO: 199 - protein, 326 aa, Artificial Sequence
  Synthetic: IgG2.3-R133K
ASTKGPSVFPLAPCSKSTSESTAALGCLVKDYFPEPVTVSWNSGALTSGVHTFPAVLQSSGLYSLSSVVTVPSSNFGTQTYTCNVDHKPSNTKVDKTVERKSCVECPPCPAPPVAGPSVFLFPPKPKDTLMISRTPEVTCVVVDVSHEDPEVQFNWYVDGVEVHNAKTKPREEQFNSTFRVVSVLTVVHQDWLNGKEYKCKVSNKGLPAPIEKTISKTKGQPREPQVYTLPPSREEMTKNQVSLTCLVKGFYPSDIAVEWESNGQPENNYKTTPPMLDSDGSFFLYSKLTVDKSRWQQGNVFSCSVMHEALHNHYTQKSLSLSPGK

SEQ ID NO: 200 - protein, 326 aa, Artificial Sequence
  Synthetic: IgG2.3-E137G
ASTKGPSVFPLAPCSRSTSGSTAALGCLVKDYFPEPVTVSWNSGALTSGVHTFPAVLQSSGLYSLSSVVTVPSSNFGTQTYTCNVDHKPSNTKVDKTVERKSCVECPPCPAPPVAGPSVFLFPPKPKDTLMISRTPEVTCVVVDVSHEDPEVQFNWYVDGVEVHNAKTKPREEQFNSTFRVVSVLTVVHQDWLNGKEYKCKVSNKGLPAPIEKTISKTKGQPREPQVYTLPPSREEMTKNQVSLTCLVKGFYPSDIAVEWESNGQPENNYKTTPPMLDSDGSFFLYSKLTVDKSRWQQGNVFSCSVMHEALHNHYTQKSLSLSPGK

SEQ ID NO: 201 - protein, 326 aa, Artificial Sequence
  Synthetic: IgG2.3-S138G
ASTKGPSVFPLAPCSRSTSEGTAALGCLVKDYFPEPVTVSWNSGALTSGVHTFPAVLQSSGLYSLSSVVTVPSSNFGTQTYTCNVDHKPSNTKVDKTVERKSCVECPPCPAPPVAGPSVFLFPPKPKDTLMISRTPEVTCVVVDVSHEDPEVQFNWYVDGVEVHNAKTKPREEQFNSTFRVVSVLTVVHQDWLNGKEYKCKVSNKGLPAPIEKTISKTKGQPREPQVYTLPPSREEMTKNQVSLTCLVKGFYPSDIAVEWESNGQPENNYKTTPPMLDSDGSFFLYSKLTVDKSRWQQGNVFSCSVMHEALHNHYTQKSLSLSPGK

SEQ ID NO: 202 - protein, 326 aa, Artificial Sequence
  Synthetic: IgG2.3-E137G-S138G
ASTKGPSVFPLAPCSRSTSGGTAALGCLVKDYFPEPVTVSWNSGALTSGVHTFPAVLQSSGLYSLSSVVTVPSSNFGTQTYTCNVDHKPSNTKVDKTVERKSCVECPPCPAPPVAGPSVFLFPPKPKDTLMISRTPEVTCVVVDVSHEDPEVQFNWYVDGVEVHNAKTKPREEQFNSTFRVVSVLTVVHQDWLNGKEYKCKVSNKGLPAPIEKTISKTKGQPREPQVYTLPPSREEMTKNQVSLTCLVKGFYPSDIAVEWESNGQPENNYKTTPPMLDSDGSFFLYSKLTVDKSRWQQGNVFSCSVMHEALHNHYTQKSLSLSPGK

SEQ ID NO: 203 - protein, 326 aa, Artificial Sequence
  Synthetic: IgG2.3-T214R
ASTKGPSVFPLAPCSRSTSESTAALGCLVKDYFPEPVTVSWNSGALTSGVHTFPAVLQSSGLYSLSSVVTVPSSNFGTQTYTCNVDHKPSNTKVDKRVERKSCVECPPCPAPPVAGPSVFLFPPKPKDTLMISRTPEVTCVVVDVSHEDPEVQFNWYVDGVEVHNAKTKPREEQFNSTFRVVSVLTVVHQDWLNGKEYKCKVSNKGLPAPIEKTISKTKGQPREPQVYTLPPSREEMTKNQVSLTCLVKGFYPSDIAVEWESNGQPENNYKTTPPMLDSDGSFFLYSKLTVDKSRWQQGNVFSCSVMHEALHNHYTQKSLSLSPGK

SEQ ID NO: 204 - protein, 326 aa, Artificial Sequence
  Synthetic: IgG2.3-R217P
ASTKGPSVFPLAPCSRSTSESTAALGCLVKDYFPEPVTVSWNSGALTSGVHTFPAVLQSSGLYSLSSVVTVPSSNFGTQTYTCNVDHKPSNTKVDKTVEPKSCVECPPCPAPPVAGPSVFLFPPKPKDTLMISRTPEVTCVVVDVSHEDPEVQFNWYVDGVEVHNAKTKPREEQFNSTFRVVSVLTVVHQDWLNGKEYKCKVSNKGLPAPIEKTISKTKGQPREPQVYTLPPSREEMTKNQVSLTCLVKGFYPSDIAVEWESNGQPENNYKTTPPMLDSDGSFFLYSKLTVDKSRWQQGNVFSCSVMHEALHNHYTQKSLSLSPGK

SEQ ID NO: 205 - protein, 326 aa, Artificial Sequence
  Synthetic: IgG2.3-R217S
ASTKGPSVFPLAPCSRSTSESTAALGCLVKDYFPEPVTVSWNSGALTSGVHTFPAVLQSSGLYSLSSVVTVPSSNFGTQTYTCNVDHKPSNTKVDKTVESKSCVECPPCPAPPVAGPSVFLFPPKPKDTLMISRTPEVTCVVVDVSHEDPEVQFNWYVDGVEVHNAKTKPREEQFNSTFRVVSVLTVVHQDWLNGKEYKCKVSNKGLPAPIEKTISKTKGQPREPQVYTLPPSREEMTKNQVSLTCLVKGFYPSDIAVEWESNGQPENNYKTTPPMLDSDGSFFLYSKLTVDKSRWQQGNVFSCSVMHEALHNHYTQKSLSLSPGK

SEQ ID NO: 206 - protein, 326 aa, Artificial Sequence
  Synthetic: IgG2.3-V224A
ASTKGPSVFPLAPCSRSTSESTAALGCLVKDYFPEPVTVSWNSGALTSGVHTFPAVLQSSGLYSLSSVVTVPSSNFGTQTYTCNVDHKPSNTKVDKTVERKSCAECPPCPAPPVAGPSVFLFPPKPKDTLMISRTPEVTCVVVDVSHEDPEVQFNWYVDGVEVHNAKTKPREEQFNSTFRVVSVLTVVHQDWLNGKEYKCKVSNKGLPAPIEKTISKTKGQPREPQVYTLPPSREEMTKNQVSLTCLVKGFYPSDIAVEWESNGQPENNYKTTPPMLDSDGSFFLYSKLTVDKSRWQQGNVFSCSVMHEALHNHYTQKSLSLSPGK

SEQ ID NO: 207 - protein, 326 aa, Artificial Sequence
  Synthetic: IgG2.3-E225A
ASTKGPSVFPLAPCSRSTSESTAALGCLVKDYFPEPVTVSWNSGALTSGVHTFPAVLQSSGLYSLSSVVTVPSSNFGTQTYTCNVDHKPSNTKVDKTVERKSCVACPPCPAPPVAGPSVFLFPPKPKDTLMISRTPEVTCVVVDVSHEDPEVQFNWYVDGVEVHNAKTKPREEQFNSTFRVVSVLTVVHQDWLNGKEYKCKVSNKGLPAPIEKTISKTKGQPREPQVYTLPPSREEMTKNQVSLTCLVKGFYPSDIAVEWESNGQPENNYKTTPPMLDSDGSFFLYSKLTVDKSRWQQGNVFSCSVMHEALHNHYTQKSLSLSPGK

SEQ ID NO: 208 - protein, 326 aa, Artificial Sequence
  Synthetic: IgG2.3-R133A
ASTKGPSVFPLAPCSASTSESTAALGCLVKDYFPEPVTVSWNSGALTSGVHTFPAVLQSSGLYSLSSVVTVPSSNFGTQTYTCNVDHKPSNTKVDKTVERKSCVECPPCPAPPVAGPSVFLFPPKPKDTLMISRTPEVTCVVVDVSHEDPEVQFNWYVDGVEVHNAKTKPREEQFNSTFRVVSVLTVVHQDWLNGKEYKCKVSNKGLPAPIEKTISKTKGQPREPQVYTLPPSREEMTKNQVSLTCLVKGFYPSDIAVEWESNGQPENNYKTTPPMLDSDGSFFLYSKLTVDKSRWQQGNVFSCSVMHEALHNHYTQKSLSLSPGK

SEQ ID NO: 209 - protein, 326 aa, Artificial Sequence
  Synthetic: IgG2.3-E137D
ASTKGPSVFPLAPCSRSTSDSTAALGCLVKDYFPEPVTVSWNSGALTSGVHTFPAVLQSSGLYSLSSVVTVPSSNFGTQTYTCNVDHKPSNTKVDKTVERKSCVECPPCPAPPVAGPSVFLFPPKPKDTLMISRTPEVTCVVVDVSHEDPEVQFNWYVDGVEVHNAKTKPREEQFNSTFRVVSVLTVVHQDWLNGKEYKCKVSNKGLPAPIEKTISKTKGQPREPQVYTLPPSREEMTKNQVSLTCLVKGFYPSDIAVEWESNGQPENNYKTTPPMLDSDGSFFLYSKLTVDKSRWQQGNVFSCSVMHEALHNHYTQKSLSLSPGK

SEQ ID NO: 210 - protein, 326 aa, Artificial Sequence
  Synthetic: IgG2.3-E137Q
ASTKGPSVFPLAPCSRSTSQSTAALGCLVKDYFPEPVTVSWNSGALTSGVHTFPAVLQSSGLYSLSSVVTVPSSNFGTQTYTCNVDHKPSNTKVDKTVERKSCVECPPCPAPPVAGPSVFLFPPKPKDTLMISRTPEVTCVVVDVSHEDPEVQFNWYVDGVEVHNAKTKPREEQFNSTFRVVSVLTVVHQDWLNGKEYKCKVSNKGLPAPIEKTISKTKGQPREPQVYTLPPSREEMTKNQVSLTCLVKGFYPSDIAVEWESNGQPENNYKTTPPMLDSDGSFFLYSKLTVDKSRWQQGNVFSCSVMHEALHNHYTQKSLSLSPGK

SEQ ID NO: 211 - protein, 326 aa, Artificial Sequence
  Synthetic: IgG2.3-S138T
ASTKGPSVFPLAPCSRSTSETTAALGCLVKDYFPEPVTVSWNSGALTSGVHTFPAVLQSSGLYSLSSVVTVPSSNFGTQTYTCNVDHKPSNTKVDKTVERKSCVECPPCPAPPVAGPSVFLFPPKPKDTLMISRTPEVTCVVVDVSHEDPEVQFNWYVDGVEVHNAKTKPREEQFNSTFRVVSVLTVVHQDWLNGKEYKCKVSNKGLPAPIEKTISKTKGQPREPQVYTLPPSREEMTKNQVSLTCLVKGFYPSDIAVEWESNGQPENNYKTTPPMLDSDGSFFLYSKLTVDKSRWQQGNVFSCSVMHEALHNHYTQKSLSLSPGK

SEQ ID NO: 212 - protein, 326 aa, Artificial Sequence
  Synthetic: IgG2.3-S138E
ASTKGPSVFPLAPCSRSTSEETAALGCLVKDYFPEPVTVSWNSGALTSGVHTFPAVLQSSGLYSLSSVVTVPSSNFGTQTYTCNVDHKPSNTKVDKTVERKSCVECPPCPAPPVAGPSVFLFPPKPKDTLMISRTPEVTCVVVDVSHEDPEVQFNWYVDGVEVHNAKTKPREEQFNSTFRVVSVLTVVHQDWLNGKEYKCKVSNKGLPAPIEKTISKTKGQPREPQVYTLPPSREEMTKNQVSLTCLVKGFYPSDIAVEWESNGQPENNYKTTPPMLDSDGSFFLYSKLTVDKSRWQQGNVFSCSVMHEALHNHYTQKSLSLSPGK

SEQ ID NO: 213 - protein, 326 aa, Artificial Sequence
  Synthetic: IgG2.3-E137A-S138I
ASTKGPSVFPLAPCSRSTSAITAALGCLVKDYFPEPVTVSWNSGALTSGVHTFPAVLQSSGLYSLSSVVTVPSSNFGTQTYTCNVDHKPSNTKVDKTVERKSCVECPPCPAPPVAGPSVFLFPPKPKDTLMISRTPEVTCVVVDVSHEDPEVQFNWYVDGVEVHNAKTKPREEQFNSTFRVVSVLTVVHQDWLNGKEYKCKVSNKGLPAPIEKTISKTKGQPREPQVYTLPPSREEMTKNQVSLTCLVKGFYPSDIAVEWESNGQPENNYKTTPPMLDSDGSFFLYSKLTVDKSRWQQGNVFSCSVMHEALHNHYTQKSLSLSPGK

SEQ ID NO: 214 - protein, 326 aa, Artificial Sequence
  Synthetic: IgG2.3-E137I-S138A
ASTKGPSVFPLAPCSRSTSIATAALGCLVKDYFPEPVTVSWNSGALTSGVHTFPAVLQSSGLYSLSSVVTVPSSNFGTQTYTCNVDHKPSNTKVDKTVERKSCVECPPCPAPPVAGPSVFLFPPKPKDTLMISRTPEVTCVVVDVSHEDPEVQFNWYVDGVEVHNAKTKPREEQFNSTFRVVSVLTVVHQDWLNGKEYKCKVSNKGLPAPIEKTISKTKGQPREPQVYTLPPSREEMTKNQVSLTCLVKGFYPSDIAVEWESNGQPENNYKTTPPMLDSDGSFFLYSKLTVDKSRWQQGNVFSCSVMHEALHNHYTQKSLSLSPGK

SEQ ID NO: 215 - protein, 326 aa, Artificial Sequence
  Synthetic: IgG2.3-R217G
ASTKGPSVFPLAPCSRSTSESTAALGCLVKDYFPEPVTVSWNSGALTSGVHTFPAVLQSSGLYSLSSVVTVPSSNFGTQTYTCNVDHKPSNTKVDKTVEGKSCVECPPCPAPPVAGPSVFLFPPKPKDTLMISRTPEVTCVVVDVSHEDPEVQFNWYVDGVEVHNAKTKPREEQFNSTFRVVSVLTVVHQDWLNGKEYKCKVSNKGLPAPIEKTISKTKGQPREPQVYTLPPSREEMTKNQVSLTCLVKGFYPSDIAVEWESNGQPENNYKTTPPMLDSDGSFFLYSKLTVDKSRWQQGNVFSCSVMHEALHNHYTQKSLSLSPGK

SEQ ID NO: 216 - protein, 326 aa, Artificial Sequence
  Synthetic: IgG2.3-R217A
ASTKGPSVFPLAPCSRSTSESTAALGCLVKDYFPEPVTVSWNSGALTSGVHTFPAVLQSSGLYSLSSVVTVPSSNFGTQTYTCNVDHKPSNTKVDKTVEAKSCVECPPCPAPPVAGPSVFLFPPKPKDTLMISRTPEVTCVVVDVSHEDPEVQFNWYVDGVEVHNAKTKPREEQFNSTFRVVSVLTVVHQDWLNGKEYKCKVSNKGLPAPIEKTISKTKGQPREPQVYTLPPSREEMTKNQVSLTCLVKGFYPSDIAVEWESNGQPENNYKTTPPMLDSDGSFFLYSKLTVDKSRWQQGNVFSCSVMHEALHNHYTQKSLSLSPGK

SEQ ID NO: 217 - protein, 326 aa, Artificial Sequence
  Synthetic: IgG2.3-R217I
ASTKGPSVFPLAPCSRSTSESTAALGCLVKDYFPEPVTVSWNSGALTSGVHTFPAVLQSSGLYSLSSVVTVPSSNFGTQTYTCNVDHKPSNTKVDKTVEIKSCVECPPCPAPPVAGPSVFLFPPKPKDTLMISRTPEVTCVVVDVSHEDPEVQFNWYVDGVEVHNAKTKPREEQFNSTFRVVSVLTVVHQDWLNGKEYKCKVSNKGLPAPIEKTISKTKGQPREPQVYTLPPSREEMTKNQVSLTCLVKGFYPSDIAVEWESNGQPENNYKTTPPMLDSDGSFFLYSKLTVDKSRWQQGNVFSCSVMHEALHNHYTQKSLSLSPGK

SEQ ID NO: 218 - protein, 326 aa, Artificial Sequence
  Synthetic: IgG2.3-R217E
ASTKGPSVFPLAPCSRSTSESTAALGCLVKDYFPEPVTVSWNSGALTSGVHTFPAVLQSSGLYSLSSVVTVPSSNFGTQTYTCNVDHKPSNTKVDKTVEEKSCVECPPCPAPPVAGPSVFLFPPKPKDTLMISRTPEVTCVVVDVSHEDPEVQFNWYVDGVEVHNAKTKPREEQFNSTFRVVSVLTVVHQDWLNGKEYKCKVSNKGLPAPIEKTISKTKGQPREPQVYTLPPSREEMTKNQVSLTCLVKGFYPSDIAVEWESNGQPENNYKTTPPMLDSDGSFFLYSKLTVDKSRWQQGNVFSCSVMHEALHNHYTQKSLSLSPGK

SEQ ID NO: 219 - protein, 326 aa, Artificial Sequence
  Synthetic: IgG2.3-R217K
ASTKGPSVFPLAPCSRSTSESTAALGCLVKDYFPEPVTVSWNSGALTSGVHTFPAVLQSSGLYSLSSVVTVPSSNFGTQTYTCNVDHKPSNTKVDKTVEKKSCVECPPCPAPPVAGPSVFLFPPKPKDTLMISRTPEVTCVVVDVSHEDPEVQFNWYVDGVEVHNAKTKPREEQFNSTFRVVSVLTVVHQDWLNGKEYKCKVSNKGLPAPIEKTISKTKGQPREPQVYTLPPSREEMTKNQVSLTCLVKGFYPSDIAVEWESNGQPENNYKTTPPMLDSDGSFFLYSKLTVDKSRWQQGNVFSCSVMHEALHNHYTQKSLSLSPGK

SEQ ID NO: 220 - protein, 326 aa, Artificial Sequence
  Synthetic: IgG2.3-V224I
ASTKGPSVFPLAPCSRSTSESTAALGCLVKDYFPEPVTVSWNSGALTSGVHTFPAVLQSSGLYSLSSVVTVPSSNFGTQTYTCNVDHKPSNTKVDKTVERKSCIECPPCPAPPVAGPSVFLFPPKPKDTLMISRTPEVTCVVVDVSHEDPEVQFNWYVDGVEVHNAKTKPREEQFNSTFRVVSVLTVVHQDWLNGKEYKCKVSNKGLPAPIEKTISKTKGQPREPQVYTLPPSREEMTKNQVSLTCLVKGFYPSDIAVEWESNGQPENNYKTTPPMLDSDGSFFLYSKLTVDKSRWQQGNVFSCSVMHEALHNHYTQKSLSLSPGK

SEQ ID NO: 221 - protein, 326 aa, Artificial Sequence
  Synthetic: IgG2.3-E225D
ASTKGPSVFPLAPCSRSTSESTAALGCLVKDYFPEPVTVSWNSGALTSGVHTFPAVLQSSGLYSLSSVVTVPSSNFGTQTYTCNVDHKPSNTKVDKTVERKSCVDCPPCPAPPVAGPSVFLFPPKPKDTLMISRTPEVTCVVVDVSHEDPEVQFNWYVDGVEVHNAKTKPREEQFNSTFRVVSVLTVVHQDWLNGKEYKCKVSNKGLPAPIEKTISKTKGQPREPQVYTLPPSREEMTKNQVSLTCLVKGFYPSDIAVEWESNGQPENNYKTTPPMLDSDGSFFLYSKLTVDKSRWQQGNVFSCSVMHEALHNHYTQKSLSLSPGK

SEQ ID NO: 222 - protein, 327 aa, Artificial Sequence
  Synthetic: IgG2-G4.1-G4-G4
ASTKGPSVFPLAPCSRSTSESTAALGCLVKDYFPEPVTVSWNSGALTSGVHTFPAVLQSSGLYSLSSVVTVPSSNFGTQTYTCNVDHKPSNTKVDKTVERKYGPPCPPCPAPEFLGGPSVFLFPPKPKDTLMISRTPEVTCVVVDVSQEDPEVQFNWYVDGVEVHNAKTKPREEQFNSTYRVVSVLTVLHQDWLNGKEYKCKVSNKGLPSSIEKTISKAKGQPREPQVYTLPPSQEEMTKNQVSLTCLVKGFYPSDIAVEWESNGQPENNYKTTPPVLDSDGSFFLYSRLTVDKSRWQEGNVFSCSVMHEALHNHYTQKSLSLSLGK

SEQ ID NO: 223 - protein, 326 aa, Artificial Sequence
  Synthetic: IgG4-G2.3-G2-G2
ASTKGPSVFPLAPCSRSTSESTAALGCLVKDYFPEPVTVSWNSGALTSGVHTFPAVLQSSGLYSLSSVVTVPSSSLGTKTYTCNVDHKPSNTKVDKRVESKSCVECPPCPAPPVAGPSVFLFPPKPKDTLMISRTPEVTCVVVDVSHEDPEVQFNWYVDGVEVHNAKTKPREEQFNSTFRVVSVLTVVHQDWLNGKEYKCKVSNKGLPAPIEKTISKTKGQPREPQVYTLPPSREEMTKNQVSLTCLVKGFYPSDIAVEWESNGQPENNYKTTPPMLDSDGSFFLYSKLTVDKSRWQQGNVFSCSVMHEALHNHYTQKSLSLSPGK

SEQ ID NO: 224 - protein, 327 aa, Artificial Sequence
  Synthetic: IgG2-G4.1-G2-G2
ASTKGPSVFPLAPCSRSTSESTAALGCLVKDYFPEPVTVSWNSGALTSGVHTFPAVLQSSGLYSLSSVVTVPSSNFGTQTYTCNVDHKPSNTKVDKTVERKYGPPCPPCPAPEFLGGPSVFLFPPKPKDTLMISRTPEVTCVVVDVSHEDPEVQFNWYVDGVEVHNAKTKPREEQFNSTFRVVSVLTVVHQDWLNGKEYKCKVSNKGLPAPIEKTISKTKGQPREPQVYTLPPSREEMTKNQVSLTCLVKGFYPSDIAVEWESNGQPENNYKTTPPMLDSDGSFFLYSKLTVDKSRWQQGNVFSCSVMHEALHNHYTQKSLSLSPGK

SEQ ID NO: 225 - protein, 326 aa, Artificial Sequence
  Synthetic: IgG4-G2.3-G4-G4
ASTKGPSVFPLAPCSRSTSESTAALGCLVKDYFPEPVTVSWNSGALTSGVHTFPAVLQSSGLYSLSSVVTVPSSSLGTKTYTCNVDHKPSNTKVDKRVESKSCVECPPCPAPPVAGPSVFLFPPKPKDTLMISRTPEVTCVVVDVSQEDPEVQFNWYVDGVEVHNAKTKPREEQFNSTYRVVSVLTVLHQDWLNGKEYKCKVSNKGLPSSIEKTISKAKGQPREPQVYTLPPSQEEMTKNQVSLTCLVKGFYPSDIAVEWESNGQPENNYKTTPPVLDSDGSFFLYSRLTVDKSRWQEGNVFSCSVMHEALHNHYTQKSLSLSLGK

SEQ ID NO: 226 - protein, 326 aa, Artificial Sequence
  Synthetic: IgG2-G2.3-G4-G4
ASTKGPSVFPLAPCSRSTSESTAALGCLVKDYFPEPVTVSWNSGALTSGVHTFPAVLQSSGLYSLSSVVTVPSSNFGTQTYTCNVDHKPSNTKVDKTVERKSCVECPPCPAPPVAGPSVFLFPPKPKDTLMISRTPEVTCVVVDVSQEDPEVQFNWYVDGVEVHNAKTKPREEQFNSTYRVVSVLTVLHQDWLNGKEYKCKVSNKGLPSSIEKTISKAKGQPREPQVYTLPPSQEEMTKNQVSLTCLVKGFYPSDIAVEWESNGQPENNYKTTPPVLDSDGSFFLYSRLTVDKSRWQEGNVFSCSVMHEALHNHYTQKSLSLSLGK

SEQ ID NO: 227 - protein, 327 aa, Artificial Sequence
  Synthetic: IgG4-G4.1-G2-G2
ASTKGPSVFPLAPCSRSTSESTAALGCLVKDYFPEPVTVSWNSGALTSGVHTFPAVLQSSGLYSLSSVVTVPSSSLGTKTYTCNVDHKPSNTKVDKRVESKYGPPCPPCPAPEFLGGPSVFLFPPKPKDTLMISRTPEVTCVVVDVSHEDPEVQFNWYVDGVEVHNAKTKPREEQFNSTFRVVSVLTVVHQDWLNGKEYKCKVSNKGLPAPIEKTISKTKGQPREPQVYTLPPSREEMTKNQVSLTCLVKGFYPSDIAVEWESNGQPENNYKTTPPMLDSDGSFFLYSKLTVDKSRWQQGNVFSCSVMHEALHNHYTQKSLSLSPGK

SEQ ID NO: 228 - protein, 327 aa, Artificial Sequence
  Synthetic: IgG4-G4.1-G1-G1
ASTKGPSVFPLAPCSRSTSESTAALGCLVKDYFPEPVTVSWNSGALTSGVHTFPAVLQSSGLYSLSSVVTVPSSSLGTKTYTCNVDHKPSNTKVDKRVESKYGPPCPPCPAPEFLGGPSVFLFPPKPKDTLMISRTPEVTCVVVDVSHEDPEVKFNWYVDGVEVHNAKTKPREEQYNSTYRVVSVLTVLHQDWLNGKEYKCKVSNKALPAPIEKTISKAKGQPREPQVYTLPPSREEMTKNQVSLTCLVKGFYPSDIAVEWESNGQPENNYKTTPPVLDSDGSFFLYSKLTVDKSRWQQGNVFSCSVMHEALHNHYTQKSLSLSPGK

SEQ ID NO: 229 - protein, 327 aa, Artificial Sequence
  Synthetic: IgG4.1
ASTKGPSVFPLAPCSRSTSESTAALGCLVKDYFPEPVTVSWNSGALTSGVHTFPAVLQSSGLYSLSSVVTVPSSSLGTKTYTCNVDHKPSNTKVDKRVESKYGPPCPPCPAPEFLGGPSVFLFPPKPKDTLMISRTPEVTCVVVDVSQEDPEVQFNWYVDGVEVHNAKTKPREEQFNSTYRVVSVLTVLHQDWLNGKEYKCKVSNKGLPSSIEKTISKAKGQPREPQVYTLPPSQEEMTKNQVSLTCLVKGFYPSDIAVEWESNGQPENNYKTTPPVLDSDGSFFLYSRLTVDKSRWQEGNVFSCSVMHEALHNHYTQKSLSLSLGK

SEQ ID NO: 230 - protein, 327 aa, Artificial Sequence
  Synthetic: IgG4.1-R214T
ASTKGPSVFPLAPCSRSTSESTAALGCLVKDYFPEPVTVSWNSGALTSGVHTFPAVLQSSGLYSLSSVVTVPSSSLGTKTYTCNVDHKPSNTKVDKTVESKYGPPCPPCPAPEFLGGPSVFLFPPKPKDTLMISRTPEVTCVVVDVSQEDPEVQFNWYVDGVEVHNAKTKPREEQFNSTYRVVSVLTVLHQDWLNGKEYKCKVSNKGLPSSIEKTISKAKGQPREPQVYTLPPSQEEMTKNQVSLTCLVKGFYPSDIAVEWESNGQPENNYKTTPPVLDSDGSFFLYSRLTVDKSRWQEGNVFSCSVMHEALHNHYTQKSLSLSLGK

SEQ ID NO: 231 - protein, 327 aa, Artificial Sequence
  Synthetic: IgG4.1-S217R
ASTKGPSVFPLAPCSRSTSESTAALGCLVKDYFPEPVTVSWNSGALTSGVHTFPAVLQSSGLYSLSSVVTVPSSSLGTKTYTCNVDHKPSNTKVDKRVERKYGPPCPPCPAPEFLGGPSVFLFPPKPKDTLMISRTPEVTCVVVDVSQEDPEVQFNWYVDGVEVHNAKTKPREEQFNSTYRVVSVLTVLHQDWLNGKEYKCKVSNKGLPSSIEKTISKAKGQPREPQVYTLPPSQEEMTKNQVSLTCLVKGFYPSDIAVEWESNGQPENNYKTTPPVLDSDGSFFLYSRLTVDKSRWQEGNVFSCSVMHEALHNHYTQKSLSLSLGK

SEQ ID NO: 232 - protein, 327 aa, Artificial Sequence
  Synthetic: IgG4.1-S217P
ASTKGPSVFPLAPCSRSTSESTAALGCLVKDYFPEPVTVSWNSGALTSGVHTFPAVLQSSGLYSLSSVVTVPSSSLGTKTYTCNVDHKPSNTKVDKRVEPKYGPPCPPCPAPEFLGGPSVFLFPPKPKDTLMISRTPEVTCVVVDVSQEDPEVQFNWYVDGVEVHNAKTKPREEQFNSTYRVVSVLTVLHQDWLNGKEYKCKVSNKGLPSSIEKTISKAKGQPREPQVYTLPPSQEEMTKNQVSLTCLVKGFYPSDIAVEWESNGQPENNYKTTPPVLDSDGSFFLYSRLTVDKSRWQEGNVFSCSVMHEALHNHYTQKSLSLSLGK

SEQ ID NO: 233 - protein, 329 aa, Artificial Sequence
  Synthetic: IgG1fa
ASTKGPSVFPLAPSSKSTSGGTAALGCLVKDYFPEPVTVSWNSGALTSGVHTFPAVLQSSGLYSLSSVVTVPSSSLGTQTYICNVNHKPSNTKVDKRVEPKSCDKTHTCPPCPAPELLGGPSVFLFPPKPKDTLMISRTPEVTCVVVDVSHEDPEVKFNWYVDGVEVHNAKTKPREEQYNSTYRVVSVLTVLHQDWLNGKEYKCKVSNKALPAPIEKTISKAKGQPREPQVYTLPPSRDELTKNQVSLTCLVKGFYPSDIAVEWESNGQPENNYKTTPPVLDSDGSFFLYSKLTVDKSRWQQGNVFSCSVMHEALHNHYTQKSLSLSPG

SEQ ID NO: 234 - protein, 330 aa, Artificial Sequence
  Synthetic: IgG1.3fa
ASTKGPSVFPLAPSSKSTSGGTAALGCLVKDYFPEPVTVSWNSGALTSGVHTFPAVLQSSGLYSLSSVVTVPSSSLGTQTYICNVNHKPSNTKVDKRVEPKSCDKTHTCPPCPAPEAEGAPSVFLFPPKPKDTLMISRTPEVTCVVVDVSHEDPEVKFNWYVDGVEVHNAKTKPREEQYNSTYRVVSVLTVLHQDWLNGKEYKCKVSNKALPAPIEKTISKAKGQPREPQVYTLPPSRDELTKNQVSLTCLVKGFYPSDIAVEWESNGQPENNYKTTPPVLDSDGSFFLYSKLTVDKSRWQQGNVFSCSVMHEALHNHYTQKSLSLSPGK

SEQ ID NO: 235 - protein, 330 aa, Artificial Sequence; identical to SEQ ID NO: 198
  Synthetic: IgG1fa-P238K

SEQ ID NO: 236 - protein, 330 aa, Artificial Sequence
  Synthetic: IgG1.3fa-P238K
ASTKGPSVFPLAPSSKSTSGGTAALGCLVKDYFPEPVTVSWNSGALTSGVHTFPAVLQSSGLYSLSSVVTVPSSSLGTQTYICNVNHKPSNTKVDKRVEPKSCDKTHTCPPCPAPEAEGAKSVFLFPPKPKDTLMISRTPEVTCVVVDVSHEDPEVKFNWYVDGVEVHNAKTKPREEQYNSTYRVVSVLTVLHQDWLNGKEYKCKVSNKALPAPIEKTISKAKGQPREPQVYTLPPSRDELTKNQVSLTCLVKGFYPSDIAVEWESNGQPENNYKTTPPVLDSDGSFFLYSKLTVDKSRWQQGNVFSCSVMHEALHNHYTQKSLSLSPGK

SEQ ID NO: 237 - protein, 330 aa, Artificial Sequence
  Synthetic: IgG1fa-L235E-P238K
ASTKGPSVFPLAPSSKSTSGGTAALGCLVKDYFPEPVTVSWNSGALTSGVHTFPAVLQSSGLYSLSSVVTVPSSSLGTQTYICNVNHKPSNTKVDKRVEPKSCDKTHTCPPCPAPELEGGKSVFLFPPKPKDTLMISRTPEVTCVVVDVSHEDPEVKFNWYVDGVEVHNAKTKPREEQYNSTYRVVSVLTVLHQDWLNGKEYKCKVSNKALPAPIEKTISKAKGQPREPQVYTLPPSRDELTKNQVSLTCLVKGFYPSDIAVEWESNGQPENNYKTTPPVLDSDGSFFLYSKLTVDKSRWQQGNVFSCSVMHEALHNHYTQKSLSLSPGK

SEQ ID NO: 238 - protein, 330 aa, Artificial Sequence
  Synthetic: IgG1fa-L235A-P238K
ASTKGPSVFPLAPSSKSTSGGTAALGCLVKDYFPEPVTVSWNSGALTSGVHTFPAVLQSSGLYSLSSVVTVPSSSLGTQTYICNVNHKPSNTKVDKRVEPKSCDKTHTCPPCPAPELAGGKSVFLFPPKPKDTLMISRTPEVTCVVVDVSHEDPEVKFNWYVDGVEVHNAKTKPREEQYNSTYRVVSVLTVLHQDWLNGKEYKCKVSNKALPAPIEKTISKAKGQPREPQVYTLPPSRDELTKNQVSLTCLVKGFYPSDIAVEWESNGQPENNYKTTPPVLDSDGSFFLYSKLTVDKSRWQQGNVFSCSVMHEALHNHYTQKSLSLSPGK

SEQ ID NO: 239 - protein, 330 aa, Artificial Sequence
  Synthetic: IgG1fa-L235E-P238K-K322A
ASTKGPSVFPLAPSSKSTSGGTAALGCLVKDYFPEPVTVSWNSGALTSGVHTFPAVLQSSGLYSLSSVVTVPSSSLGTQTYICNVNHKPSNTKVDKRVEPKSCDKTHTCPPCPAPELEGGKSVFLFPPKPKDTLMISRTPEVTCVVVDVSHEDPEVKFNWYVDGVEVHNAKTKPREEQYNSTYRVVSVLTVLHQDWLNGKEYKCAVSNKALPAPIEKTISKAKGQPREPQVYTLPPSRDELTKNQVSLTCLVKGFYPSDIAVEWESNGQPENNYKTTPPVLDSDGSFFLYSKLTVDKSRWQQGNVFSCSVMHEALHNHYTQKSLSLSPGK

SEQ ID NO: 240 - protein, 326 aa, Artificial Sequence; identical to SEQ ID NO: 79
  Synthetic: IgG2.3

SEQ ID NO: 241 - protein, 326 aa, Artificial Sequence
  Synthetic: IgG2.3-P238K
ASTKGPSVFPLAPCSRSTSESTAALGCLVKDYFPEPVTVSWNSGALTSGVHTFPAVLQSSGLYSLSSVVTVPSSNFGTQTYTCNVDHKPSNTKVDKTVERKSCVECPPCPAPPVAGKSVFLFPPKPKDTLMISRTPEVTCVVVDVSHEDPEVQFNWYVDGVEVHNAKTKPREEQFNSTFRVVSVLTVVHQDWLNGKEYKCKVSNKGLPAPIEKTISKTKGQPREPQVYTLPPSREEMTKNQVSLTCLVKGFYPSDIAVEWESNGQPENNYKTTPPMLDSDGSFFLYSKLTVDKSRWQQGNVFSCSVMHEALHNHYTQKSLSLSPGK

SEQ ID NO: 242 - protein, 327 aa, Artificial Sequence; identical to SEQ ID NO: 80
  Synthetic: IgG2.3G1

SEQ ID NO: 243 - protein, 327 aa, Artificial Sequence
  Synthetic: IgG2.3G1-P238K
ASTKGPSVFPLAPCSRSTSESTAALGCLVKDYFPEPVTVSWNSGALTSGVHTFPAVLQSSGLYSLSSVVTVPSSNFGTQTYTCNVDHKPSNTKVDKTVERKSCVECPPCPAPELLGGKSVFLFPPKPKDTLMISRTPEVTCVVVDVSHEDPEVKFNWYVDGVEVHNAKTKPREEQYNSTYRVVSVLTVLHQDWLNGKEYKCKVSNKALPAPIEKTISKAKGQPREPQVYTLPPSREEMTKNQVSLTCLVKGFYPSDIAVEWESNGQPENNYKTTPPVLDSDGSFFLYSKLTVDKSRWQQGNVFSCSVMHEALHNHYTQKSLSLSPGK

SEQ ID NO: 244 - protein, 327 aa, Artificial Sequence
  Synthetic: IgG2.3G1-L235E-P238K
ASTKGPSVFPLAPCSRSTSESTAALGCLVKDYFPEPVTVSWNSGALTSGVHTFPAVLQSSGLYSLSSVVTVPSSNFGTQTYTCNVDHKPSNTKVDKTVERKSCVECPPCPAPELEGGKSVFLFPPKPKDTLMISRTPEVTCVVVDVSHEDPEVKFNWYVDGVEVHNAKTKPREEQYNSTYRVVSVLTVLHQDWLNGKEYKCKVSNKALPAPIEKTISKAKGQPREPQVYTLPPSREEMTKNQVSLTCLVKGFYPSDIAVEWESNGQPENNYKTTPPVLDSDGSFFLYSKLTVDKSRWQQGNVFSCSVMHEALHNHYTQKSLSLSPGK

SEQ ID NO: 245 - protein, 327 aa, Artificial Sequence
  Synthetic: IgG2.5G1-P238K
ASTKGPSVFPLAPSSRSTSESTAALGCLVKDYFPEPVTVSWNSGALTSGVHTFPAVLQSSGLYSLSSVVTVPSSNFGTQTYTCNVDHKPSNTKVDKTVERKCCVECPPCPAPELLGGKSVFLFPPKPKDTLMISRTPEVTCVVVDVSHEDPEVKFNWYVDGVEVHNAKTKPREEQYNSTYRVVSVLTVLHQDWLNGKEYKCKVSNKALPAPIEKTISKAKGQPREPQVYTLPPSREEMTKNQVSLTCLVKGFYPSDIAVEWESNGQPENNYKTTPPVLDSDGSFFLYSKLTVDKSRWQQGNVFSCSVMHEALHNHYTQKSLSLSPGK

SEQ ID NO: 246 - protein, 330 aa, Artificial Sequence; identical to SEQ ID NO: 78
  Synthetic: hIgG1f

SEQ ID NO: 247 - protein, 330 aa, Artificial Sequence
  Synthetic:
ASTKGPSVFPLAPSSKSTSGGTAALGCLVKDYFPEPVTVSWNSGALTSGVHTFPAVLQSSGLYSLSSVVTVPSSSLGTQTYICNVNHKPSNTKVDKRVEPKSCDKTHTCPPCPAPELLGGKSVFLFPPKPKDTLMISRTPEVTCVVVDVSHEDPEVKFNWYVDGVEVHNAKTKPREEQYNSTYRVVSVLTVLHQDWLNGKEYKCKVSNKALPAPIEKTISKAKGQPREPQVYTLPPSREEMTKNQVSLTCLVKGFYPSDIAVEWESNGQPENNYKTTPPVLDSDGSFFLYSKLTVDKSRWQQGNVFSCSVMHEALHNHYTQKSLSLSPGK

SEQ ID NO: 248 - protein, 330 aa, Artificial Sequence
  Synthetic: hIgG1.3f
ASTKGPSVFPLAPSSKSTSGGTAALGCLVKDYFPEPVTVSWNSGALTSGVHTFPAVLQSSGLYSLSSVVTVPSSSLGTQTYICNVNHKPSNTKVDKRVEPKSCDKTHTCPPCPAPEAEGAPSVFLFPPKPKDTLMISRTPEVTCVVVDVSHEDPEVKFNWYVDGVEVHNAKTKPREEQYNSTYRVVSVLTVLHQDWLNGKEYKCKVSNKALPAPIEKTISKAKGQPREPQVYTLPPSREEMTKNQVSLTCLVKGFYPSDIAVEWESNGQPENNYKTTPPVLDSDGSFFLYSKLTVDKSRWQQGNVFSCSVMHEALHNHYTQKSLSLSPGK

SEQ ID NO: 249 - protein, 330 aa, Artificial Sequence
  Synthetic: hIgG1.3f-P238K
ASTKGPSVFPLAPSSKSTSGGTAALGCLVKDYFPEPVTVSWNSGALTSGVHTFPAVLQSSGLYSLSSVVTVPSSSLGTQTYICNVNHKPSNTKVDKRVEPKSCDKTHTCPPCPAPEAEGAKSVFLFPPKPKDTLMISRTPEVTCVVVDVSHEDPEVKFNWYVDGVEVHNAKTKPREEQYNSTYRVVSVLTVLHQDWLNGKEYKCKVSNKALPAPIEKTISKAKGQPREPQVYTLPPSREEMTKNQVSLTCLVKGFYPSDIAVEWESNGQPENNYKTTPPVLDSDGSFFLYSKLTVDKSRWQQGNVFSCSVMHEALHNHYTQKSLSLSPGK

SEQ ID NO: 250 - protein, 330 aa, Artificial Sequence
  Synthetic: hIgG1f-L235E-P238K
ASTKGPSVFPLAPSSKSTSGGTAALGCLVKDYFPEPVTVSWNSGALTSGVHTFPAVLQSSGLYSLSSVVTVPSSSLGTQTYICNVNHKPSNTKVDKRVEPKSCDKTHTCPPCPAPELEGGKSVFLFPPKPKDTLMISRTPEVTCVVVDVSHEDPEVKFNWYVDGVEVHNAKTKPREEQYNSTYRVVSVLTVLHQDWLNGKEYKCKVSNKALPAPIEKTISKAKGQPREPQVYTLPPSREEMTKNQVSLTCLVKGFYPSDIAVEWESNGQPENNYKTTPPVLDSDGSFFLYSKLTVDKSRWQQGNVFSCSVMHEALHNHYTQKSLSLSPGK

SEQ ID NO: 251 - protein, 330 aa, Artificial Sequence
  Synthetic: hIgG1f-L235E-P238K-K322A
ASTKGPSVFPLAPSSKSTSGGTAALGCLVKDYFPEPVTVSWNSGALTSGVHTFPAVLQSSGLYSLSSVVTVPSSSLGTQTYICNVNHKPSNTKVDKRVEPKSCDKTHTCPPCPAPELEGGKSVFLFPPKPKDTLMISRTPEVTCVVVDVSHEDPEVKFNWYVDGVEVHNAKTKPREEQYNSTYRVVSVLTVLHQDWLNGKEYKCAVSNKALPAPIEKTISKAKGQPREPQVYTLPPSREEMTKNQVSLTCLVKGFYPSDIAVEWESNGQPENNYKTTPPVLDSDGSFFLYSKLTVDKSRWQQGNVFSCSVMHEALHNHYTQKSLSLSPGK

SEQ ID NO: 252 - protein, 327 aa, Artificial Sequence; identical to SEQ ID NO: 180
  Synthetic: IgG2.3G1.3f

SEQ ID NO: 253 - protein, 327 aa, Artificial Sequence
  Synthetic: IgG2.3G1.3f-P238K
ASTKGPSVFPLAPCSRSTSESTAALGCLVKDYFPEPVTVSWNSGALTSGVHTFPAVLQSSGLYSLSSVVTVPSSNFGTQTYTCNVDHKPSNTKVDKTVERKSCVECPPCPAPEAEGAKSVFLFPPKPKDTLMISRTPEVTCVVVDVSHEDPEVKFNWYVDGVEVHNAKTKPREEQYNSTYRVVSVLTVLHQDWLNGKEYKCKVSNKALPAPIEKTISKAKGQPREPQVYTLPPSREEMTKNQVSLTCLVKGFYPSDIAVEWESNGQPENNYKTTPPVLDSDGSFFLYSKLTVDKSRWQQGNVFSCSVMHEALHNHYTQKSLSLSPGK

SEQ ID NO: 254 - protein, 327 aa, Artificial Sequence
  Synthetic: IgG2.3G1-L235E-P238K-K322A
ASTKGPSVFPLAPCSRSTSESTAALGCLVKDYFPEPVTVSWNSGALTSGVHTFPAVLQSSGLYSLSSVVTVPSSNFGTQTYTCNVDHKPSNTKVDKTVERKSCVECPPCPAPELEGGKSVFLFPPKPKDTLMISRTPEVTCVVVDVSHEDPEVKFNWYVDGVEVHNAKTKPREEQYNSTYRVVSVLTVLHQDWLNGKEYKCAVSNKALPAPIEKTISKAKGQPREPQVYTLPPSREEMTKNQVSLTCLVKGFYPSDIAVEWESNGQPENNYKTTPPVLDSDGSFFLYSKLTVDKSRWQQGNVFSCSVMHEALHNHYTQKSLSLSPGK

SEQ ID NO: 255 - protein, 326 aa, Artificial Sequence; identical to SEQ ID NO: 82
  Synthetic: IgG2.5

SEQ ID NO: 256 - protein, 326 aa, Artificial Sequence
  Synthetic: IgG2.5-P238K
ASTKGPSVFPLAPSSRSTSESTAALGCLVKDYFPEPVTVSWNSGALTSGVHTFPAVLQSSGLYSLSSVVTVPSSNFGTQTYTCNVDHKPSNTKVDKTVERKCCVECPPCPAPPVAGKSVFLFPPKPKDTLMISRTPEVTCVVVDVSHEDPEVQFNWYVDGVEVHNAKTKPREEQFNSTFRVVSVLTVVHQDWLNGKEYKCKVSNKGLPAPIEKTISKTKGQPREPQVYTLPPSREEMTKNQVSLTCLVKGFYPSDIAVEWESNGQPENNYKTTPPMLDSDGSFFLYSKLTVDKSRWQQGNVFSCSVMHEALHNHYTQKSLSLSPGK

SEQ ID NO: 257 - protein, 327 aa, Artificial Sequence; identical to SEQ ID NO: 89
  Synthetic: IgG2.5G1

SEQ ID NO: 258 - protein, 327 aa, Artificial Sequence; identical to SEQ ID NO: 245
  Synthetic: IgG2.5G1-P238K

SEQ ID NO: 259 - protein, 327 aa, Artificial Sequence; identical to SEQ ID NO: 184
  Synthetic: IgG2.5G1.3f

SEQ ID NO: 260 - protein, 327 aa, Artificial Sequence
  Synthetic: IgG2.5G1.3f-P238K
ASTKGPSVFPLAPSSRSTSESTAALGCLVKDYFPEPVTVSWNSGALTSGVHTFPAVLQSSGLYSLSSVVTVPSSNFGTQTYTCNVDHKPSNTKVDKTVERKCCVECPPCPAPEAEGAKSVFLFPPKPKDTLMISRTPEVTCVVVDVSHEDPEVKFNWYVDGVEVHNAKTKPREEQYNSTYRVVSVLTVLHQDWLNGKEYKCKVSNKALPAPIEKTISKAKGQPREPQVYTLPPSREEMTKNQVSLTCLVKGFYPSDIAVEWESNGQPENNYKTTPPVLDSDGSFFLYSKLTVDKSRWQQGNVFSCSVMHEALHNHYTQKSLSLSPGK

SEQ ID NO: 261 - protein, 327 aa, Artificial Sequence
  Synthetic: IgG2.5G1-L235E-P238K
ASTKGPSVFPLAPSSRSTSESTAALGCLVKDYFPEPVTVSWNSGALTSGVHTFPAVLQSSGLYSLSSVVTVPSSNFGTQTYTCNVDHKPSNTKVDKTVERKCCVECPPCPAPELEGGKSVFLFPPKPKDTLMISRTPEVTCVVVDVSHEDPEVKFNWYVDGVEVHNAKTKPREEQYNSTYRVVSVLTVLHQDWLNGKEYKCKVSNKALPAPIEKTISKAKGQPREPQVYTLPPSREEMTKNQVSLTCLVKGFYPSDIAVEWESNGQPENNYKTTPPVLDSDGSFFLYSKLTVDKSRWQQGNVFSCSVMHEALHNHYTQKSLSLSPGK

SEQ ID NO: 262 - protein, 327 aa, Artificial Sequence
  Synthetic: IgG2.5G1-L235E-P238K-K322A
ASTKGPSVFPLAPSSRSTSESTAALGCLVKDYFPEPVTVSWNSGALTSGVHTFPAVLQSSGLYSLSSVVTVPSSNFGTQTYTCNVDHKPSNTKVDKTVERKCCVECPPCPAPELEGGKSVFLFPPKPKDTLMISRTPEVTCVVVDVSHEDPEVKFNWYVDGVEVHNAKTKPREEQYNSTYRVVSVLTVLHQDWLNGKEYKCAVSNKALPAPIEKTISKAKGQPREPQVYTLPPSREEMTKNQVSLTCLVKGFYPSDIAVEWESNGQPENNYKTTPPVLDSDGSFFLYSKLTVDKSRWQQGNVFSCSVMHEALHNHYTQKSLSLSPGK

SEQ ID NO: 263 - protein, 348 aa, Artificial Sequence
  Synthetic: 3h56-269-IgG4.1 OR BMS-986090
EVQLLESGGGLVQPGGSLRLSCAASGFTFRDYEMWWVRQAPGKGLERVSAINPQGTRTYYADSVKGRFTISRDNSKNTLYLQMNSLRAEDTAVYYCAKLPFRFSDRGQGTLVTVSSASTESKYGPPCPPCPAPEFLGGPSVFLFPPKPKDTLMISRTPEVTCVVVDVSQEDPEVQFNWYVDGVEVHNAKTKPREEQFNSTYRVVSVLTVLHQDWLNGKEYKCKVSNKGLPSSIEKTISKAKGQPREPQVYTLPPSQEEMTKNQVSLTCLVKGFYPSDIAVEWESNGQPENNYKTTPPVLDSDGSFFLYSRLTVDKSRWQEGNVFSCSVMHEALHNHYTQKSLSLSLGK

SEQ ID NO: 264 - protein, 351 aa, Artificial Sequence
  Synthetic: 3h56-269-CT
EVQLLESGGGLVQPGGSLRLSCAASGFTFRDYEMWWVRQAPGKGLERVSAINPQGTRTYYADSVKGRFTISRDNSKNTLYLQMNSLRAEDTAVYYCAKLPFRFSDRGQGTLVTVSSASTEPKSSDKTHTSPPSPAPELLGGSSVFLFPPKPKDTLMISRTPEVTCVVVDVSHEDPEVKFNWYVDGVEVHNAKTKPREEQYNSTYRVVSVLTVLHQDWLNGKEYKCKVSNKALPAPIEKTISKAKGQPREPQVYTLPPSRDELTKNQVSLTCLVKGFYPSDIAVEWESNGQPENNYKTTPPVLDSDGSFFLYSKLTVDKSRWQQGNVFSCSVMHEALHNHYTQKSLSLSPGK

SEQ ID NO: 265 - protein, 351 aa, Artificial Sequence
  Synthetic: 3h56-269-IgG1.1f
EVQLLESGGGLVQPGGSLRLSCAASGFTFRDYEMWWVRQAPGKGLERVSAINPQGTRTYYADSVKGRFTISRDNSKNTLYLQMNSLRAEDTAVYYCAKLPFRFSDRGQGTLVTVSSASTEPKSCDKTHTCPPCPAPEAEGAPSVFLFPPKPKDTLMISRTPEVTCVVVDVSHEDPEVKFNWYVDGVEVHNAKTKPREEQYNSTYRVVSVLTVLHQDWLNGKEYKCKVSNKALPSSIEKTISKAKGQPREPQVYTLPPSREEMTKNQVSLTCLVKGFYPSDIAVEWESNGQPENNYKTTPPVLDSDGSFFLYSKLTVDKSRWQQGNVFSCSVMHEALHNHYTQKSLSLSPGK

SEQ ID NO: 266 - protein, 351 aa, Artificial Sequence
  Synthetic: 3h56-269-IgG1.3f
EVQLLESGGGLVQPGGSLRLSCAASGFTFRDYEMWWVRQAPGKGLERVSAINPQGTRTYYADSVKGRFTISRDNSKNTLYLQMNSLRAEDTAVYYCAKLPFRFSDRGQGTLVTVSSASTEPKSCDKTHTCPPCPAPEAEGAPSVFLFPPKPKDTLMISRTPEVTCVVVDVSHEDPEVKFNWYVDGVEVHNAKTKPREEQYNSTYRVVSVLTVLHQDWLNGKEYKCKVSNKALPAPIEKTISKAKGQPREPQVYTLPPSREEMTKNQVSLTCLVKGFYPSDIAVEWESNGQPENNYKTTPPVLDSDGSFFLYSKLTVDKSRWQQGNVFSCSVMHEALHNHYTQKSLSLSPGK

SEQ ID NO: 267 - protein, 351 aa, Artificial Sequence
  Synthetic: 3h56-269-IgG1-D265A
EVQLLESGGGLVQPGGSLRLSCAASGFTFRDYEMWWVRQAPGKGLERVSAINPQGTRTYYADSVKGRFTISRDNSKNTLYLQMNSLRAEDTAVYYCAKLPFRFSDRGQGTLVTVSSASTEPKSCDKTHTCPPCPAPELLGGPSVFLFPPKPKDTLMISRTPEVTCVVVAVSHEDPEVKFNWYVDGVEVHNAKTKPREEQYNSTYRVVSVLTVLHQDWLNGKEYKCKVSNKALPAPIEKTISKAKGQPREPQVYTLPPSREEMTKNQVSLTCLVKGFYPSDIAVEWESNGQPENNYKTTPPVLDSDGSFFLYSKLTVDKSRWQQGNVFSCSVMHEALHNHYTQKSLSLSPGK

SEQ ID NO: 268 - protein, 218 aa, Artificial Sequence
  Synthetic: 1F4 Heavy chain variable region and CH1
EVQLLESGGGLVQPGGSLRLSCAASGFTFSIYAMSWVRQAPGKGLEWVSAISDSGGRTYFADSVRGRFTISRDNSKNTLSLQMNSLRAEDTAVYYCAKVDYSNYLFFDYWGQGTLVTVSSASTKGPSVFPLAPSSKSTSGGTAALGCLVKDYFPEPVTVSWNSGALTSGVHTFPAVLQSSGLYSLSSVVTVPSSSLGTQTYICNVNHKPSNTKVDKRV

SEQ ID NO: 269 - protein, 215 aa, Artificial Sequence
  Synthetic: 1F4 Light chain variable region and CL
EIVLTQSPGTLSLSPGERATLSCRASQSISSSYLAWYQQKPGQAPRLLIYGASSRATGIPDRFSGSGSGTDFTLTISRLEPEDFAVYYCQQYGSSPYTFGQGTKLEIKRTVAAPSVFIFPPSDEQLKSGTASVVCLLNNFYPREAKVQWKVDNALQSGNSQESVTEQDSKDSTYSLSSTLTLSKADYEKHKVYACEVTHQGLSSPVTKSFNRGEC

SEQ ID NO: 270 - protein, 450 aa, Artificial Sequence
  Synthetic: 1F4-IgG1f heavy chain
EVQLLESGGGLVQPGGSLRLSCAASGFTFSIYAMSWVRQAPGKGLEWVSAISDSGGRTYFADSVRGRFTISRDNSKNTLSLQMNSLRAEDTAVYYCAKVDYSNYLFFDYWGQGTLVTVSSASTKGPSVFPLAPSSKSTSGGTAALGCLVKDYFPEPVTVSWNSGALTSGVHTFPAVLQSSGLYSLSSVVTVPSSSLGTQTYICNVNHKPSNTKVDKRVEPKSCDKTHTCPPCPAPELLGGPSVFLFPPKPKDTLMISRTPEVTCVVVDVSHEDPEVKFNWYVDGVEVHNAKTKPREEQYNSTYRVVSVLTVLHQDWLNGKEYKCKVSNKALPAPIEKTISKAKGQPREPQVYTLPPSREEMTKNQVSLTCLVKGFYPSDIAVEWESNGQPENNYKTTPPVLDSDGSFFLYSKLTVDKSRWQQGNVFSCSVMHEALHNHYTQKSLSLSPGK

SEQ ID NO: 271 - protein, 446 aa, Artificial Sequence
  Synthetic: 1F4-IgG4.1 heavy chain
EVQLLESGGGLVQPGGSLRLSCAASGFTFSIYAMSWVRQAPGKGLEWVSAISDSGGRTYFADSVRGRFTISRDNSKNTLSLQMNSLRAEDTAVYYCAKVDYSNYLFFDYWGQGTLVTVSSASTKGPSVFPLAPCSRSTSESTAALGCLVKDYFPEPVTVSWNSGALTSGVHTFPAVLQSSGLYSLSSVVTVPSSSLGTKTYTCNVDHKPSNTKVDKRVESKYGPPCPPCPAPEFLGGPSVFLFPPKPKDTLMISRTPEVTCVVVDVSQEDPEVQFNWYVDGVEVHNAKTKPREEQFNSTYRVVSVLTVLHQDWLNGKEYKCKVSNKGLPSSIEKTISKAKGQPREPQVYTLPPSQEEMTKNQVSLTCLVKGFYPSDIAVEWESNGQPENNYKTTPPVLDSDGSFFLYSRLTVDKSRWQEGNVFSCSVMHEALHNHYTQKSLSLSLG

SEQ ID NO: 272 - protein, 449 aa, Artificial Sequence
  Synthetic: 1F4-IgG1.1f heavy chain
EVQLLESGGGLVQPGGSLRLSCAASGFTFSIYAMSWVRQAPGKGLEWVSAISDSGGRTYFADSVRGRFTISRDNSKNTLSLQMNSLRAEDTAVYYCAKVDYSNYLFFDYWGQGTLVTVSSASTKGPSVFPLAPSSKSTSGGTAALGCLVKDYFPEPVTVSWNSGALTSGVHTFPAVLQSSGLYSLSSVVTVPSSSLGTQTYICNVNHKPSNTKVDKRVEPKSCDKTHTCPPCPAPEAEGAPSVFLFPPKPKDTLMISRTPEVTCVVVDVSHEDPEVKFNWYVDGVEVHNAKTKPREEQYNSTYRVVSVLTVLHQDWLNGKEYKCKVSNKALPSSIEKTISKAKGQPREPQVYTLPPSREEMTKNQVSLTCLVKGFYPSDIAVEWESNGQPENNYKTTPPVLDSDGSFFLYSKLTVDKSRWQQGNVFSCSVMHEALHNHYTQKSLSLSPG

SEQ ID NO: 273 - protein, 449 aa, Artificial Sequence
  Synthetic: 1F4-IgG1.3f heavy chain
EVQLLESGGGLVQPGGSLRLSCAASGFTFSIYAMSWVRQAPGKGLEWVSAISDSGGRTYFADSVRGRFTISRDNSKNTLSLQMNSLRAEDTAVYYCAKVDYSNYLFFDYWGQGTLVTVSSASTKGPSVFPLAPSSKSTSGGTAALGCLVKDYFPEPVTVSWNSGALTSGVHTFPAVLQSSGLYSLSSVVTVPSSSLGTQTYICNVNHKPSNTKVDKRVEPKSCDKTHTCPPCPAPEAEGAPSVFLFPPKPKDTLMISRTPEVTCVVVDVSHEDPEVKFNWYVDGVEVHNAKTKPREEQYNSTYRVVSVLTVLHQDWLNGKEYKCKVSNKALPAPIEKTISKAKGQPREPQVYTLPPSREEMTKNQVSLTCLVKGFYPSDIAVEWESNGQPENNYKTTPPVLDSDGSFFLYSKLTVDKSRWQQGNVFSCSVMHEALHNHYTQKSLSLSPG

SEQ ID NO: 274 - protein, 448 aa, Artificial Sequence
  Synthetic: 1F4-D265A heavy chain
EVQLLESGGGLVQPGGSLRLSCAASGFTFSIYAMSWVRQAGKGLEWVSAISDSGGRTYFADSVRGRFTISRDNSKNTLSLQMNSLRAEDTAVYYCAKVDYSNYLFFDYWGQGTLVTVSSASTKGPSVFPLAPSSKSTSGGTAALGCLVKDYFPEPVTVSWNSGALTSGVHTFPAVLQSSGLYSLSSVVTVPSSSLGTQTYICNVNHKPSNTKVDKRVEPKSCDKTHTCPPCPAPELLGGPSVFLFPPKPKDTLMISRTPEVTCVVVAVSHEDPEVKFNWYVDGVEVHNAKTKPREEQYNSTYRVVSVLTVLHQDWLNGKEYKCKVSNKALPAPIEKTISKAKGQPREPQVYTLPPSREEMTKNQVSLTCLVKGFYPSDIVEWESNGQPENNYKTTPPVLDSDGSFFLYSKLTVDKSRWQQGNVFSCSVMHEALHNHYTQKSLSLSPGK

SEQ ID NO: 275 - protein, 450 aa, Artificial Sequence
  Synthetic: 1F4-CT heavy chain
EVQLLESGGGLVQPGGSLRLSCAASGFTFSIYAMSWVRQAPGKGLEWVSAISDSGGRTYFADSVRGRFTISRDNSKNTLSLQMNSLRAEDTAVYYCAKVDYSNYLFFDYWGQGTLVTVSSASTKGPSVFPLAPSSKSTSGGTAALGCLVKDYFPEPVTVSWNSGALTSGVHTFPAVLQSSGLYSLSSVVTVPSSSLGTQTYICNVNHKPSNTKVDKRVEPKSCDKTHTSPPSPAPELLGGSSVFLFPPKPKDTLMISRTPEVTCVVVDVSHEDPEVKFNWYVDGVEVHNAKTKPREEQYNSTYRVVSVLTVLHQDWLNGKEYKCKVSNKALPAPIEKTISKAKGQPREPQVYTLPPSRDELTKNQVSLTCLVKGFYPSDIAVEWESNGQPENNYKTTPPVLDSDGSFFLYSKLTVDKSRWQQGNVFSCSVMHEALHNHYTQKSLSLSPGK

SEQ ID NO: 276 - protein, 30 aa, Artificial Sequence
  Synthetic: Table 2  hinge domain
EPKSCDTPPPCPRCPEPKSCDTPPPCPRCP

SEQ ID NO: 277 - protein, 45 aa, Artificial Sequence
  Synthetic: Table 2  hinge domain
EPKSCDTPPPCPRCPEPKSCDTPPPCPRCPEPKSCDTPPPCPRCP

SEQ ID NO: 278 - protein, 5 aa, Artificial Sequence
  Synthetic: Linker
PVGVV

SEQ ID NO: 279 - protein, 228 aa, Artificial Sequence
  Synthetic: Fig. 21 - hIgG1f
DKTHTCPPCPAPELLGGPSVFLFPPKPKDTLMISRTPEVTCVVVDVSHEDPEVKFNWYVDGVEVHNAKTKPREEQYNSTYRVVSVLTVLHQDDWLNGKEYKCKVSNKALPAPIEKTISKAKGQPREPQVYTLPPSREEMTKNQVSLTCLVKGFYPSDIAVEWESNGQPENNYKTIPPVLDSDGSFFLYSKLTVDKSRWQQGNVFSCSVMHEALHNHYTQKSLSLSPGK

SEQ ID NO: 280 - protein, 17 aa, Artificial Sequence
  Synthetic: Fig. 21 - hIgG1f
CPPCPAPELLGGPSVFL

SEQ ID NO: 281 - protein, 16 aa, Artificial Sequence
  Synthetic: Fig. 21 - hIgG1f
YKCKVSNKALPAPIEK

SEQ ID NO: 282 - protein, 17 aa, Artificial Sequence
  Synthetic: Fig. 21 - hIgG1.if
CPPCPAPEAEGAPSVFL

SEQ ID NO: 283 - protein, 16 aa, Artificial Sequence
  Synthetic: Fig. 21 - hIgG1.if
YKCKVSNKALPSSIEK

SEQ ID NO: 284 - protein, 17 aa, Artificial Sequence
  Synthetic: Fig. 21 - hIgG1.3f
CPPCPAPEAEGAPSVFL

SEQ ID NO: 285 - protein, 16 aa, Artificial Sequence
  Synthetic: Fig. 21 - hIgG1.3f
YKCKVSNKALPAPIEK

SEQ ID NO: 286 - protein, 17 aa, Artificial Sequence
  Synthetic: Fig. 21 - hIgG1 -P238K
CPPCPAPELLGGKSVFL

SEQ ID NO: 287 - protein, 16 aa, Artificial Sequence
  Synthetic: Fig. 21 - hIgG1 -P238K
YKCKVSNKALPAPIEK

1. An isolated antibody or fusion protein comprising a heavy chain constant domain of an IgG1 or IgG2 antibody or a portion thereof or comprising an amino acid sequence selected from SEQ ID NOs: 233 (IgG1fa), 240 (IgG2.3), 242 (IgG2.3G1), 246 (IgG1f), 255 (IgG2.5) and 257 (IgG2.5G1), wherein the heavy chain constant domain further comprises a substitution at one or more of amino acid residues L234, L235, P238, G237 and K322, wherein the antibody or fusion protein has (i) reduced binding to a low affinity Fc receptor; (ii) reduced binding to a high affinity Fc receptor; (iii) reduced binding to C1q; (iv) reduced ADCC; (v) reduced ADCP; and/or (vi) reduced CDC relative to the same antibody or fusion protein but without the amino acid substitution at one or more of amino acid residues L234, L235, P238, G237 and K322.

2. The isolated antibody or fusion protein of claim 1, wherein the heavy chain constant domain:
is that of an IgG1 antibody or a portion thereof or comprises an amino acid sequence selected from SEQ ID NOs: 233 (IgG1fa), 242 (IgG2.3G1), 246 (IgG1f), and 257 (IgG2.5G1), and wherein the heavy chain constant domain further comprises a substitution at one or more of amino acid residues L234, L235, P238, G237 and K322; or
is that of an IgG2 antibody or a portion thereof or comprises an amino acid sequence selected from SEQ ID NOs: 240 (IgG2.3) or 255 (IgG2.5), and wherein the heavy chain constant domain further comprises a substitution at one or more of amino acid residues P238 and K322.

3. The isolated antibody or fusion protein of claim 1, wherein the substitution at L234 is L234A or a conservative substitution thereof; the substitution at L235 is L235E or a conservative substitution thereof; the substitution at P238 is P238K or a conservative substitution thereof; the substitution at G237 is G237A or a conservative substitution thereof and the substitution at K322 is K322A or a conservative substitution thereof.

4. The isolated antibody or fusion protein of claim 1, wherein the substitution at L234 is L234A; the substitution at L235 is L235E; the substitution at P238 is P238K; the substitution at G237 is G237A and the substitution at K322 is K322A.

5-6. (canceled)

7. The isolated antibody or fusion protein of claim 1, wherein the heavy chain constant domain comprises at least a portion of the hinge that is from an IgG1 antibody, and comprises a substitution at P238 or a conservative substitution thereof, and a substitution at L235E or a conservative substitution thereof.

8. The isolated antibody or fusion protein of claim 7, wherein the heavy chain constant domain does not comprise any other mutation that reduces effector function.

9. The isolated antibody or fusion protein of claim 1, wherein the heavy chain constant domain comprises at least a portion of the hinge that is from an IgG1 antibody, and comprises:
(a) a substitution at P238 or a conservative substitution thereof, a substitution at L235E or a conservative substitution thereof and a substitution at K322A or a conservative substitution thereof;
(b) a substitution at P238 or a conservative substitution thereof and a substitution at K322A or a conservative substitution thereof;
(c) a substitution at P238 or a conservative substitution thereof, a substitution at L235E or a conservative substitution thereof; a substitution at K322A or a conservative substitution thereof and a substitution at L234 or a conservative substitution thereof;
(d) a substitution at P238 or a conservative substitution thereof, a substitution at L235E or a conservative substitution thereof; a substitution at K322A or a conservative substitution thereof; a substitution at L234 or a conservative substitution thereof and a substitution at G237 or a conservative substitution thereof;
(e) a substitution at P238 or a conservative substitution thereof, a substitution at L235E or a conservative substitution thereof; a substitution at K322A or a conservative substitution thereof and a substitution at G237 or a conservative substitution thereof;
(f) a substitution at P238 or a conservative substitution thereof; a substitution at K322A or a conservative substitution thereof; a substitution at L234 or a conservative substitution thereof and a substitution at G237 or a conservative substitution thereof;
(g) a substitution at P238 or a conservative substitution thereof; a substitution at L234 or a conservative substitution thereof and a substitution at G237 or a conservative substitution thereof;
(h) a substitution at P238 or a conservative substitution thereof and a substitution at L234 or a conservative substitution thereof;
(i) a substitution at P238 or a conservative substitution thereof and a substitution at G237 or a conservative substitution thereof;
(j) a substitution at P238 or a conservative substitution thereof; a substitution at L235 or a conservative substitution thereof; a substitution at L234 or a conservative substitution thereof and a substitution at G237 or a conservative substitution thereof;
(k) a substitution at P238 or a conservative substitution thereof; a substitution at L235 or a conservative substitution thereof; and a substitution at L234 or a conservative substitution thereof;
(l) a substitution at P238 or a conservative substitution thereof; a substitution at L235 or a conservative substitution thereof; and a substitution at G237 or a conservative substitution thereof;
(m) a substitution at P238 or a conservative substitution thereof; a substitution at K322 or a conservative substitution thereof; a substitution at L234 or a conservative substitution thereof and a substitution at G237 or a conservative substitution thereof;
(n) a substitution at P238 or a conservative substitution thereof; a substitution at K322 or a conservative substitution thereof; and a substitution at L234 or a conservative substitution thereof; or
(o) a substitution at P238 or a conservative substitution thereof; a substitution at K322 or a conservative substitution thereof and a substitution at G237 or a conservative substitution thereof.

10-38. (canceled)

39. The isolated antibody or fusion protein of claim 1, wherein the heavy chain constant domain comprises at least a portion of the hinge that is from an IgG1 antibody, and comprises one of the following substitutions or groups of subsitutions: P238K; P238K/L235E; P238K/L235E/K322A; P238K/K322A; P238K/L234A/G237A; P238K/G237A; P238K/L234A; P238K/L235E/L234A/G237A; P238K/L235E/G237A; P238K/L235E/L234A; P238K/K322/L234A/G237A; P238K/K322/G237A and P238K/K322/L234A.

40. The isolated antibody or fusion protein of claim 1, wherein the heavy chain constant domain comprises one of the following substitutions or groups of subsitutions: P238K and P238K/K322A.

41. The isolated antibody or fusion protein of claim 1, wherein the heavy chain constant domain comprises an amino acid sequence that is at least 80%, 85%, 90%, 95%, 98% or 99% identical to that of a wildtype IgG1 or IgG2 or one of SEQ ID NOs: 233 (IgG1fa), 240 (IgG2.3), 242 (IgG2.3G1), 246 (IgG1f), 255 (IgG2.5) and 257 (IgG2.5G1) or an allotypic variant of any of these, except for the one or more amino acid substitutions recited in one of claims 186-225.

42. (canceled)

43. The isolated antibody or fusion protein of claim 1, wherein the heavy chain constant domain comprises an amino acid sequence selected from SEQ ID NOs: 235-239, 241, 243, 244, 245, 252-254, 256 and 259-262.

44. The isolated antibody or fusion protein of claim 1, wherein P238 is P238R or P238H.

45. The isolated antibody or fusion protein of claim 1, wherein L235 is L235D.

46. The isolated antibody or fusion protein of claim 1, wherein K322 is K322V, K322L, K322I, K322P, K322F or K322M.

47. The isolated antibody or fusion protein of claim 1, wherein the heavy chain constant domain does not comprise the C-terminal lysine.
